(19) United States
(12) Patent Application Publication
(10) Pub. No.: US 2006/0052291 A1
(43) Pub. Date: Mar. 9, 2006

(54) Chemically-modified progenipoietin conjugates

(76) Inventors: Ned R. Siegal, Belleville, IL (US); Rory F. Finn, Manchester, MO (US); Robert L. Hills, St. Charles, MO (US)

Correspondence Address: CAROL M. NIELSEN;WINSTEAD SECHREST & MINICK, P.C., 2400 BANK ONE CENTER, 910 TRAVIS STREET, HOUSTON, TX, 77002, US

(21) Appl. No.: 10/481,935

(22) PCT Filed: Jun. 14, 2002
(86) PCT No.: PCT/US02/18810

§ 371 Date: Dec. 22, 2003

(30) Foreign Application Priority Data
Jun. 22, 2001 (US) 60300362

(51) Int. Cl. A61K 38/18; C07K 14/475; C12P 21/06; C12N 5/08

(52) U.S. Cl. 514/12; 525/54.1; 530/350; 435/372; 435/69.1; 435/320.1

(57) ABSTRACT

The present invention provides a chemically modified Progenipoietins (ProGPs) prepared by binding a water soluble polymer to the protein. The chemically-modified protein according to the present invention may have a much longer lasting neutrophil-increasing activity than that of the un-modified ProGP, enabling reduced dose and scheduling opportunities.

### FIELD OF THE INVENTION

[0001] The present invention relates to a chemical modification of Progenipoietins (ProGPs), a family of recombinant proteins, which are multifunctional agonists of flt3 ligand and another hematopoietic growth factor receptor, including but not limited to G-CSF, by which the chemical and/or physiological properties of ProGP can be changed. The PEGylated ProGPs may have a decreased clearance rate, improved stability, decreased antigenicity, or a combination thereof. The family of ProGP proteins is defined as the multifunctional proteins comprising a flt3 receptor agonist and a second hematopoietic growth factor or colony stimulating factor receptor agonist described in WO98/17810, which is incorporated herein in its entirety. The present invention also relates to processes for the modification of ProGP. In addition, the present invention relates to pharmaceutical compositions comprising the modified ProGP. A further embodiment is the use of the modified ProGP to treat hematopoietic disorders.

### BACKGROUND OF THE INVENTION

[0002] Progenipoietin may be useful in the treatment of general haematopoietic disorders, including those arising from chemotherapy or from radiation therapy (Mac Vittie, T. J.; et al., Exp. Hematol. (1999), 27(10), 1557-1568). ProGP may also be useful in bone marrow transplantation, wound healing, burn treatment, and the treatment of parasite, bacterial or viral infection.

[0003] It is generally observed that physiologically active proteins administered into a body can show their pharmacological activity only for a short period due to their high clearance rate in the body. Furthermore, the relative hydrophobicity of these proteins may limit their stability.

[0004] For the purpose of decreasing the clearance rate, improving stability or abolishing antigenicity of therapeutic proteins, some methods have been proposed wherein the proteins are chemically modified with water-soluble polymers. Chemical modification of this type may block effectively a proteolytic enzyme from physical contact with the protein backbone itself, thus preventing degradation. Chemical attachment may effectively reduce renal clearance. Additional advantages include, under certain circumstances, increasing the stability and circulation time of the therapeutic protein, increasing solubility, and decreasing immunogenicity. A review article describing protein modification and fusion proteins is Francis, Focus on Growth Factors 3: 4-10 (May 1992) (published by Mediscript, Mountview Court, Friern Barnet Lane, London N20, OLD, UK).

[0005] Poly(alkylene oxide), notably poly(ethylene glycol) (PEG), is one such chemical moiety, which has been used in the preparation of therapeutic protein products (the verb “pegylate” meaning to attach at least one PEG molecule). The attachment of poly(ethylene glycol) has been shown to protect against proteolysis, Sada, et al., J. Fermentation Bioengineering 71: 137-139 (1991), and methods for attachment of certain poly(ethylene glycol) moieties are available. See U.S. Pat. No. 4,179,337, Davis et al., “Non-Immunogenic Polypeptides,” issued Dec. 18, 1979; and U.S. Pat. No. 4,002,531, Royer, “Modifying enzymes with Polyethylene Glycol and Product Produced Thereby,” issued Jan. 11, 1977. For a review, see Abuchowski et al., in Enzymes as Drugs. (J. S. Holcerberg and J. Roberts, eds. pp. 367-383 (1981)).

[0006] Other water-soluble polymers have been used, such as copolymers of ethylene glycol/propylene glycol, carboxymethylcellulose, dextran, poly(vinyl alcohol), poly(vinyl pyrrolidone), poly(-1,3-dioxolane), poly(-1,3,6-trioxane), ethylene/maleic anhydride copolymer, and poly-amino acids (either homopolymers or random copolymers).

[0007] A number of examples of pegylated therapeutic proteins have been described. ADAGEN®, a pegylated formulation of adenosine deaminase, is approved for treating severe combined immunodeficiency disease. ONCASPAR®, a pegylated L-asparaginase has been approved for treating hypersensitive ALL patients. Pegylated superoxide dismutase has been in clinical trials for treating head injury. Pegylated α-interferon (U.S. Pat. Nos. 5,738,846, 5,382,657) has been tested in phase III clinical trials for treating hepatitis with PEG-Intron (pegitron alfa-2b) approved for the treatment of chronic hepatitis C while another molecule, PEGASYS™, still awaits regulatory approval; pegylated glucocerebrosidase and pegylated hemoglobin are reported to have been in preclinical testing. Another example is pegylated IL-6, EF 0 442 724, entitled, “Modified hIL-6,” which discloses poly(ethylene glycol) molecules added to IL-6.

[0008] Another specific therapeutic protein, which has been chemically modified, is granulocyte colony stimulating factor, (G-CSF). G-CSF induces the rapid proliferation and release of neutrophilic granulocytes to the blood stream, and thereby provides therapeutic effect in fighting infection. European patent publication EP 0 401 384, published Dec. 12, 1990, entitled, “Chemically Modified Granulocyte Colony Stimulating Factor,” describes materials and methods for preparing G-CSF to which poly(ethylene glycol) molecules are attached. Modified G-CSF and analogs thereof are also reported in EP 0 473 268, published Mar. 4, 1992, entitled “Continuous Release Pharmaceutical Compositions Comprising a Polypeptide Covalently Conjugated To A Water Soluble Polymer,” stating the use of various G-CSF and derivatives covalently conjugated to a water soluble particle polymer, such as poly(ethylene glycol). A modified polypeptide having human granulocyte colony stimulating factor activity is reported in EP 0 335 423 published Oct. 4, 1989. Provided in U.S. Pat. No. 5,824,784 are methods for N-terminally modifying proteins, including N-terminally chemically modified G-CSF compositions. U.S. Pat. No. 5,824,778 discloses chemically modified G-CSF.

[0009] Japanese patent application Hei2 (1990)-30555 discloses chemically modified human IL-3 having decreased antigenicity.

[0010] The family of ProGP proteins is disclosed in WO 98/17810.

[0011] For poly(ethylene glycol), a variety of means has been used to attach the poly(ethylene glycol) molecules to the protein. Generally, poly(ethylene glycol) molecules are connected to the protein via a reactive group found on the protein.

[0012] Amino groups, such as those on lysine residues or at the N-terminus, are convenient for such attachment. For example, Royer (U.S. Pat. No. 4,002,531, above) states that reductive alkylation was used for attachment of poly(ethylene glycol) molecules to an enzyme. EP 0 539 167, published Apr. 28, 1993, Wright, “Peg Imidates and Protein Derivatives Thereof” states that peptides and organic compounds with free amino group(s) are modified with an imidate derivative of PEG or related water-soluble organic polymers. Chamow et al., Bioconjugate Chem. 5: 133-140 (1994) report the modification of CD4 immunoadhesin with monomethoxypoly(ethylene glycol)aldehyde via reductive alkylation. The authors report that 50% of the CD4-Ig was MePEG-modified under conditions allowing control over the extent of pegylation. Ibid. at page 137. The authors also report that the in vitro binding capability of the modified CD4-Ig (to the protein gp 120) decreased at a rate correlated to the extent of MePEGylation Ibid. U.S. Pat. No. 4,904,584, Shaw, issued Feb. 27, 1990, relates to the modification of the number of lysine residues in proteins for the attachment of poly(ethylene glycol) molecules via reactive amine groups.

[0013] Many methods of attaching a polymer to a protein involve using a moiety to act as a linking group. However, such moieties may be antigenic. A tresyl chloride method involving no linking group is available, but this method may be difficult to use to produce therapeutic products as the use of tresyl chloride may produce toxic by-products. See Francis et al., In: Stability of protein pharmaceuticals: in vivo pathways of degradation and strategies for protein stabilization (Eds. Ahern. T. and Manning, M. C.) Plenum, New York, 1991) Also, Delgado et al., “Coupling of PEG to Protein By Activation With Tresyl Chloride, Applications In Immunoaffinity Cell Preparation”, in Separations Using Aqueous Phase Systems, Applications In Cell Biology and Biotechnology, Fisher et al., eds. Plenum Press; New York, N.Y., 1989 pp. 211-213.

[0014] See also, Rose et al., Bioconjugate Chemistry 2: 154-159 (1991) which reports the selective attachment of the linker group carbohydrazide to the C-terminal carboxyl group of a protein substrate (insulin).

[0015] The present invention provides chemically modified ProGP molecules having decreased clearance rate, increased stability, decreased antigenicity, or combinations thereof.

### SUMMARY OF THE INVENTION

[0016] The present invention relates to chemically modified ProGPs, which have at least one improved chemical or physiological property selected from but not limited to decreased clearance rate, increased stability, and decreased antigenicity. Thus, as described below in more detail, the present invention has a number of aspects relating to chemically modifying ProGPs as well as specific modifications using a variety of poly(ethylene glycol) moieties.

[0017] The present invention also relates to methods of producing the chemically modified ProGPs.

[0018] The present invention also relates to compositions comprising the chemically modified ProGPs.

[0019] The modified ProGP of the present invention may be useful in the treatment of, but not limited to, neutropenia, thrombocytopenia, mobilization of hematopoietic progenitors and stem cells into peripheral blood, bone marrow suppression or hematopoietic deficiencies, and immunodeficiencies.

### BRIEF DESCRIPTION OF THE DRAWINGS

[0020] FIG. 1 is a reproduction of the ion-exchange chromatography elution profile of a 30,000 MW PEG-ALD ProGP-4 reaction.

[0021] FIG. 2a is an SEC HPLC profile of recombinant ProGP-4.

[0022] FIG. 2b is an SEC HPLC profile of the 30,000 MW PEG-ALD ProGP-4 Reaction mix.

[0023] FIG. 2c is an SEC HPLC profile of ion exchange purified N-terminally mono-pegylated 30,000 MW PEG-ALD ProGP-4.

[0024] FIG. 3 is an SDS-PAGE of 30000 MW PEG-ALD ProGP-4. Lane 1. MW Protein standards; Lane 2. Blank; Lane 3. ProGP-4; Lane 4. 30,000 MW PEG-ALD ProGP-4.

[0025] FIG. 4 is an SDS-SEC HPLC profile of ion exchange purified N-terminally mono-pegylated 30,000 MW PEG-ALD ProGP-4.

[0026] FIG. 5 shows a reversed phase HPLC profile for N-terminally mono-PEGylated 30,000 MW PEG-ALD ProGP-4.

[0027] FIG. 6 shows a MALDI-TOF spectrum of reversed phase purified monomeric mono-PEGylated 30,000 MW PEG-ALD ProGP-4 monomer.

[0028] FIG. 7 shows a SEC HPLC profile of a mono-PEGylated 30,000 MW PEG-ALD ProGP-4 trypsin digest.

[0029] FIG. 8 illustrates a comparison of response curves for a flt3 receptor agonist, a G-CSF receptor agonist, co-addition of a flt3 receptor agonist and a G-CSF receptor agonist, un-PEGylated ProGP-4 and mono-PEGylated 30,000 MW PEG-ALD ProGP-4 in a colony forming unit granulocyte/macrophage (CFU-GM) assay which measures expansion and differentiation of a human bone marrow-derived CD34+ cells.

[0030] FIG. 9 illustrates a comparison of murine plasma concentration curves for ProGP-4 and mono-PEGylated 30,000 MW PEG-ALD ProGP-4.

[0031] FIG. 10 compares the in vivo bioactivity of un-PEGylated ProgP-4 dosed daily in mice to N-terminally mono-PEGylated 30,000 MW PEG-ALD ProGP-4 dosed every three days by illustrating the total white blood cell (WBC) and dendritic cell (DC) counts in peripheral blood and spleen obtained 24 hours following dosing.

[0032] FIG. 11 compares the kinetics of the in vivo DC response for un-PEGylated ProgP-4 dosed daily in mice to N-terminally mono-PEGylated 30,000 MW PEG-ALD ProGP-4 dosed every three days by illustrating the total white blood cell(WBC) and dendritic cell (DC) counts in peripheral blood and spleen obtained 24, 48 and 72 hours following dosing.

[0033] FIG. 12 shows the amino acid sequence of ProGP-4.

### DETAILED DESCRIPTION OF THE INVENTION

[0034] Progenipoietin (ProGP) proteins are members of a family of recombinant proteins, which are multifunctional agonists of flt3 ligand and another hematopoietic growth factor. Their recombinant production and methods of use are detailed in WO 98/17810.

[0035] Progenipoietin proteins are of the formula
R₁-L₁-R₂, R₂-L₁-R₁, R₁-R₂, or R₂-R₁

[0036] wherein R₁ is a polypeptide comprising; a modified flt-3 ligand amino acid sequence of the Formula:

```
SEQ ID NO:1
ThrGlnAspCysSerPheGlnHisSerProIleSerSerAspPheAlaValLysIleArg
                                                      10 20
GluLeuSerAspTyrLeuLeuGlnAspTyrProValThrValAlaSerAsnLeuGlnAsp
                                                      30 40
GluGluLeuCysGlyGlyLeuTrpArgLeuValLeuAlaGlnArgTrpMetGluArgLeu
                                                      50 60
LysThrValAlaGlySerLysMetGlnGlyLeuLeuGluArgValAsnThrGluIleHis
                                                      70 80
PheValThrLysCysAlaPheGlnProProProSerCysLeuArgPheValGlnThrAsn
                                                      90 100
IleSerArgLeuLeuGlnGluThrSerGluGlnLeuValAlaLeuLysProTrpIleThr
                                                      110 120
ArgGlnAsnPheSerArgCysLeuGluLeuGlnCysGlnProASrSerSerThrLeu
                                                      130
```

[0037] wherein the N-terminus is joined to the C-terminus directly or through a linker (L₂) capable of joining the N-terminus to the C-terminus and having new C- and N-termini at amino acids;

28-29
29-30
30-31
31-32
32-33
34-35
36-37
37-38
38-39
39-40
40-41
41-42
42-43
64-65
65-66
66-67
86-87
87-88
88-89
89-90
90-91
91-92
92-93
93-94
94-95
95-96
96-97
97-98
98-99
99-100
100-101
101-102
102-103
respectively;

[0038] wherein R₂ is a factor selected from the group consisting of: a colony stimulating factor, a cytokine, a lymphokine, an interleukin, and a hematopoietic growth factor;

[0039] wherein L₁ is a linker capable of linking R₁ to R₂.

[0040] The Progenipoietin protein can optionally be immediately preceded by (methionine⁻¹), (alanine⁻¹) or (methionine⁻², alanine⁻¹).

[0041] In a preferred embodiment the Progenipoietin proteins are of the formula:
R₁-L₁-R₂, R₂-L₁-R₁, R₁-R₂, or R₂-R₁

[0042] wherein R₁ is a polypeptide comprising; a modified flt-3 ligand amino acid sequence of the Formula:

```
SEQ ID NO:1
ThrGlnAspCysSerPheGlnHisSerProIleSerSerAspPheAlaValLysIleArg
                                                      10 20
GluLeuSerAspTyrLeuLeuGlnAspTyrProValThrValAlaSerAsnLeuGlnAsp
                                                      30 40
GluGluLeuCysGlyGlyLeuTrpArgLeuValLeuAlaGlnArgTrpMetGluArgLeu
                                                      50 60
LysThrValAlaGlySerLysMetGlnGlyLeuLeuGluArgValAsnThrGluIleHis
                                                      70 80
PheValThrLysCysAlaPheGlnProProProSerCysLeuArgPheValGlnThrAsn
                                                      90 100
IleSerArgLeuLeuGlnGluThrSerGluGlnLeuValAlaLeuLysProTrpIleThr
                                                      110 120
ArgGlnAsnPheSerArgCysLeuGluLeuGlnCysGlnProASrSerSerThrLeu
                                                      130
```

[0043] wherein the N-terminus is joined to the C-terminus directly or through a linker (L₂) capable of joining the N-terminus to the C-terminus and having new C- and N-termini at amino acids;

28-29
29-30
30-31
31-32
32-33
34-35
36-37
37-38
38-39
39-40
40-41
41-42
42-43
64-65
65-66
66-67
86-87
87-88
88-89
89-90
90-91
91-92
92-93
93-94
94-95
95-96
96-97
97-98
98-99
99-100
100-101
101-102
102-103
respectively;

[0044] wherein R₂ is a polypeptide, comprising; a modified human G-CSF amino acid sequence of the formula:

```
SEQ ID NO:260
1 10
Xaa Xaa Xaa Gly Pro Ala Ser Ser Leu Pro Gln Ser Xaa
                                                20
Leu Leu Xaa Xaa Xaa Glu Gln Val Xaa Lys Xaa Gln Gly Xaa Gly
        30 40
Ala Xaa Leu Gln Glu Xaa Leu Xaa Ala Thr Tyr Lys Leu Xaa Xaa
                                                50
Xaa Glu Xaa Xaa Val Xaa Xaa Gly His Ser Xaa Gly Ile Pro Trp
        60 70
Ala Pro Leu Ser Ser Xaa Pro Ser Xaa Ala Leu Xaa Leu Ala Gly
                                                80
Xaa Leu Ser Gln Leu His Ser Gly Leu Phe Leu Tyr Gln Gly Leu
        90 100
Leu Gln Ala Leu Glu Gly Ile Ser Pro Glu Leu Gly Pro Thr Leu
                                                110
Xaa Thr Leu Gln Xaa Asp Val Ala Asp Phe Ala Xaa Thr Ile Trp
        120 130
Gln Gln Met Glu Xaa Xaa Gly Met Ala Pro Ala Leu Gln Pro Thr
                                                140
Gln Gly Ala Met Pro Ala Phe Ala Ser Ala Xaa Gln Xaa Xaa Ala
        150 160
Gly Gly Val Leu Val Ala Ser Xaa Leu Gln Xaa Phe Leu Xaa Xaa
                                                170
Ser Tyr Arg Val Leu Xaa Xaa Leu Ala Gln Pro
```

wherein
[0045] Xaa at position 1 is Thr, Ser, Arg, Tyr or Gly;
[0046] Xaa at position 2 is Pro or Leu;
[0047] Xaa at position 3 is Leu, Arg, Tyr or Ser;
[0048] Xaa at position 13 is Phe, Ser, His, Thr or Pro;
[0049] Xaa at position 16 is Lys, Pro, Ser, Thr or His;
[0050] Xaa at position 17 is Cys, Ser, Gly, Ala, Ile, Tyr or Arg;
[0051] Xaa at position 18 is Leu, Thr, Pro, His, Ile or Cys;
[0052] Xaa at position 22 is Arg, Tyr, Ser, Thr or Ala;
[0053] Xaa at position 24 is Ile, Pro, Tyr or Leu;
[0054] Xaa at position 27 is Asp, or Gly;
[0055] Xaa at position 30 is Ala, Ile, Leu or Gly;
[0056] Xaa at position 34 is Lys or Ser;
[0057] Xaa at position 36 is Cys or Ser;
[0058] Xaa at position 42 is Cys or Ser;
[0059] Xaa at position 43 is His, Thr, Gly, Val, Lys, Trp, Ala, Arg, Cys, or Leu;
[0060] Xaa at position 44 is Pro, Gly, Arg, Asp, Val, Ala, His, Trp, Gln, or Thr;
[0061] Xaa at position 46 is Glu, Arg, Phe, Arg, Ile or Ala;
[0062] Xaa at position 47 is Leu or Thr;
[0063] Xaa at position 49 is Leu, Phe, Arg or Ser;
[0064] Xaa at position 50 is Leu, Ile, His, Pro or Tyr;
[0065] Xaa at position 54 is Leu or His;
[0066] Xaa at position 64 is Cys or Ser;
[0067] Xaa at position 67 is Gln, Lys, Leu or Cys;
[0068] Xaa at position 70 is Gln, Pro, Leu, Arg or Ser;
[0069] Xaa at position 74 is Cys or Ser;
[0070] Xaa at position 104 is Asp, Gly or Val;
[0071] Xaa at position 108 is Leu, Ala, Val, Arg, Trp, Gln or Gly;
[0072] Xaa at position 115 is Thr, His, Leu or Ala;
[0073] Xaa at position 120 is Gln, Gly, Arg, Lys or His
[0074] Xaa at position 123 is Glu, Arg, Phe or Thr
[0075] Xaa at position 144 is Phe, His, Arg, Pro, Leu, Gln or Glu;
[0076] Xaa at position 146 is Arg or Gln;
[0077] Xaa at position 147 is Arg or Gln;
[0078] Xaa at position 156 is His, Gly or Ser;
[0079] Xaa at position 159 is Ser, Arg, Thr, Tyr, Val or Gly;
[0080] Xaa at position 162 is Glu, Leu, Gly or Trp;
[0081] Xaa at position 163 is Val, Gly, Arg or Ala;
[0082] Xaa at position 169 is Arg, Ser, Leu, Arg or Cys;
[0083] Xaa at position 170 is His, Arg or Ser;
   wherein 1-11 amino acids from the N-terminus and/or 1-5 amino acids from the C-terminus are optionally deleted from said modified human G-CSF amino acid sequence; and

[0084] wherein the N-terminus is joined to the C-terminus directly or through a linker (L₂) capable of joining the N-terminus to the C-terminus and having new C- and N-termini at amino acids;

38-39
39-40
40-41
41-42
42-43
43-44
45-46
48-49
49-50
52-53
53-54
54-55
55-56
56-57
57-58
58-59
59-60
60-61
61-62
62-63
63-64
64-65
65-66
66-67
67-68
68-69
69-70
70-71
71-72
91-92
92-93
93-94
94-95
95-96
96-97
97-98
98-99
99-100
123-124
124-125
125-126
126-127
128-129
128-129
129-130
130-131
131-132
132-133
133-134
134-135
135-136
136-137
137-138
138-139
139-140
140-141
141-142
or 142-143
respectively;

[0085] wherein L₁ is a linker capable of linking R₁ to R₂.

[0086] In another embodiment the progenipoietin can optionally be immediately preceded by (methionine⁻¹), (alanine⁻¹) or (methionine⁻², alanine⁻¹).

[0087] In a preferred embodiment R₁ is selected from SEQ ID NO:2, SEQ ID NO:3, SEQ ID NO:4, SEQ ID NO:5, SEQ ID NO:6, SEQ ID NO:7, SEQ ID NO:8, SEQ ID NO:9, SEQ ID NO:10, SEQ ID NO:11, SEQ ID NO:12, SEQ ID NO:13, SEQ ID NO:14, SEQ ID NO:15, SEQ ID NO:16, SEQ ID NO:17, SEQ ID NO:18, SEQ ID NO:19, SEQ ID NO:20, SEQ ID NO:21, SEQ ID NO:22, SEQ ID NO:23, SEQ ID NO:24, SEQ ID NO:25, SEQ ID NO:26, SEQ ID NO:27, SEQ ID NO:28, SEQ ID NO:29, SEQ ID NO:30, SEQ ID NO:31, SEQ ID NO:169, SEQ ID NO:170, SEQ ID NO:171, SEQ ID NO:172, SEQ ID NO:173, SEQ ID NO:174, and SEQ ID NO:175.

[0088] In a preferred embodiment R₂ is GM-CSF, G-CSF, G-CSF Ser¹⁷, c-mpl ligand (TPO), M-CSF, erythropoietin (EPO), IL-1, IL-4, IL-2, IL-3, IL-3 variant, IL-5, IL 6, IL-7, IL-8, IL-9, IL-10, IL-11, IL-12, IL-13, IL-15, LIF, flt3/flk2 ligand, human growth hormone, B-cell growth factor, B-cell differentiation factor, eosinophil differentiation factor and stem cell factor (SCF).

[0089] In a preferred embodiment the Progenipoietin protein is selected from SEQ ID NO:32, SEQ ID NO:33, SEQ ID NO:34, SEQ ID NO:35, SEQ ID NO:36, SEQ ID NO:37, 38, SEQ ID NO:39, SEQ ID NO:40, SEQ ID NO:41, SEQ ID NO:42, SEQ ID NO:43, SEQ ID NO:44, SEQ ID NO:45, SEQ ID NO:46, SEQ ID NO:47, SEQ ID NO:48, SEQ ID NO:49, SEQ ID NO:50, SEQ ID NO:51, SEQ ID NO:52, SEQ ID NO:53, SEQ ID NO:54, SEQ ID NO:55, SEQ ID NO:56, SEQ ID NO:57, SEQ ID NO:58, SEQ ID NO:59, SEQ ID NO:60, SEQ ID NO:61, SEQ ID NO:62, SEQ ID NO:63, SEQ ID NO:64, SEQ ID NO:65, SEQ ID NO:66, SEQ ID NO:67, SEQ ID NO:68, SEQ ID NO:69, SEQ ID NO:70, SEQ ID NO:71, SEQ ID NO:72, SEQ ID NO:73, SEQ ID NO:74, SEQ ID NO:75, SEQ ID NO:76, SEQ ID NO:77, SEQ ID NO:78, SEQ ID NO:79, SEQ ID NO:80, SEQ ID NO:81, SEQ ID NO:82, SEQ ID NO:83, SEQ ID NO:84, SEQ ID NO:85, SEQ ID NO:86, SEQ ID NO:87, SEQ ID NO:88, SEQ ID NO:89, SEQ ID NO:90, SEQ ID NO:91, SEQ ID NO:92, SEQ ID NO:93, SEQ ID NO:94, SEQ ID NO:95, SEQ ID NO:96, SEQ ID NO:97, SEQ ID NO:98, SEQ ID NO:99, SEQ ID NO:100, SEQ ID NO:101, SEQ ID NO:102, SEQ ID NO:103, SEQ ID NO:104, SEQ ID NO:105, SEQ ID NO:106, SEQ ID NO:107, SEQ ID NO:108, SEQ ID NO:109, SEQ ID NO:110, SEQ ID NO:111, SEQ ID NO:112, SEQ ID NO:113, SEQ ID NO:114, SEQ ID NO:115, SEQ ID NO:116, SEQ ID NO:117, SEQ ID NO:118, SEQ ID NO:119, SEQ ID NO:120, SEQ ID NO:121, SEQ ID NO:122, SEQ ID NO:123, SEQ ID NO:124, SEQ ID NO:125, SEQ ID NO:126, SEQ ID NO:127, SEQ ID NO:128, SEQ ID NO:129, SEQ ID NO:130, SEQ ID NO:131, SEQ ID NO:132, SEQ ID NO:133, SEQ ID NO:134, SEQ ID NO:135, SEQ ID NO:136, SEQ ID NO:137, SEQ ID NO:138, SEQ ID NO:139, SEQ ID NO:140, SEQ ID NO:141, SEQ ID NO:142, SEQ ID NO:143, SEQ ID NO:144, SEQ ID NO:145, SEQ ID NO:146, SEQ ID NO:147, SEQ ID NO:148, SEQ ID NO:149, SEQ ID NO:150, SEQ ID NO:151, SEQ ID NO:152, SEQ ID NO:153, SEQ ID NO:154, SEQ ID NO:155, SEQ ID NO:1556, SEQ ID NO:157, SEQ ID NO:158, SEQ ID NO:159, SEQ ID NO:160, SEQ ID NO:161, SEQ ID NO:162, SEQ ID NO:163, SEQ ID NO:164, SEQ ID NO:165, SEQ ID NO:166, SEQ ID NO:167, SEQ ID NO:168, SEQ ID NO:176, SEQ ID NO:177, SEQ ID NO:178, SEQ ID NO:179, SEQ ID NO:180, SEQ ID NO:181, SEQ ID NO:182, SEQ ID NO:183, SEQ ID NO:184, SEQ ID NO:185, SEQ ID NO:186, SEQ ID NO:187, SEQ ID NO:188, SEQ ID NO:189, SEQ ID NO:190, SEQ ID NO:191, SEQ ID NO:192, SEQ ID NO:193, SEQ ID NO:194, SEQ ID NO:195, SEQ ID NO:196, SEQ ID NO:197, SEQ ID NO:198, SEQ ID NO:199, SEQ ID NO:200, SEQ ID NO:201, SEQ ID NO:202, SEQ ID NO:203, SEQ ID NO:204, SEQ ID NO:205, SEQ ID NO:206, SEQ ID NO:207, SEQ ID NO:208, SEQ ID NO:209, SEQ ID NO:210, SEQ ID NO:211, SEQ ID NO:212, SEQ ID NO:213, SEQ ID NO:214, SEQ ID NO:215, SEQ ID NO:216, SEQ ID NO:217, SEQ ID NO:218, SEQ ID NO:219, SEQ ID NO:220, SEQ ID NO:221, SEQ ID NO:222, SEQ ID NO:223, SEQ ID NO:224, SEQ ID NO:225, SEQ ID NO:226, SEQ ID NO:227, SEQ ID NO:228, SEQ ID NO:229, and SEQ ID NO:230. More preferably the Progenipoietin protein is SEQ ID NO:165.

[0090] In a preferred embodiment R₂ is selected from the group consisting of G-CSF, G-CSF Ser¹⁷, G-CSF Ala¹⁷ and c-mpl ligand (TPO).

[0091] In a preferred embodiment R₂ is an IL-3 variant of SEQ ID 261. In a preferred embodiment R₂ is the IL-3 variant of SEQ ID NO:256, SEQ ID NO:257, SEQ ID NO:258, or SEQ ID NO:259.

[0092] In preferred embodiment the linker (L₂) is selected from the group consisting of;

| | |
|---|---|
| Ser; | |
| Asn; | |
| Gly; | |
| Thr; | |
| GlySer; | |
| AlaAla; | |
| GlySerGly; | |
| GlyGlyGly; | |
| GlyAsnGly; | |
| GlyAlaGly; | |
| GlyThrGly; | |
| AlaSerAla; | |
| AlaAlaAla; | |
| GlyGlyGlySer; | SEQ ID NO:231 |
| GlyGlyGlySerGlyGlyGlySer; | SEQ ID NO:232 |
| GlyGlyGlySerGlyGlyGlySerGlyGlyGlySer; | SEQ ID NO:233 |
| SerGlyGlySerGlyGlySer; | SEQ ID NO:234 |
| GluPheGlyAsnMet; | SEQ ID NO:235 |
| GluPheGlyGlyAsnMet; | SEQ ID NO:236 |
| GluPheGlyGlyAsnGlyGlyAsnMet; | SEQ ID NO:237 |
| GlyGlySerAspMetAlaGly; | SEQ ID NO:238 |
| SerGlyGlyAsnGly; | SEQ ID NO:239 |
| SerGlyGlyAsnGlySerGlyGlyAsnGly; | SEQ ID NO:240 |
| SerGlyGlyAsnGlySerGlyGlyAsnGlySerGly | SEQ ID NO:241 |
| GlyAsnGly; | |
| SerGlyGlySerGlySerGlyGlySerGly; | SEQ ID NO:242 |
| SerGlyGlySerGlySerGlyGlySerGlySerGly | SEQ ID NO:243 |
| GlySerGly; | |
| GlyGlyGlySerGlyGly; | SEQ ID NO:244 |
| GlyGlyGlySerGlyGlyGly; | SEQ ID NO:245 |
| GlyGlyGlySerGlyGlyGlySerGlyGly; | SEQ ID NO:246 |
| GlyGlyGlySerGlyGlyGlySerGlyGlyGlySer | SEQ ID NO:247 |
| Gly; | |
| GlyGlyGlySerGlyGlyGlySerGlyGlyGlySer | SEQ ID NO:248 |
| GlyGlyGly; | |
| GlyGlyGlySerGlyGlyGlySerGlyGlyGlySer | SEQ ID NO:249 |
| GlyGlyGlySerGlyGlyGlySerGly; | |
| ProProProTrpSerProArgProLeuGlyAlaThr | SEQ ID NO:250 |
| AlaProThrAlaGlyGlnProProLeu; | |
| ProProProTrpSerProArgProLeuGlyAlaThr | SEQ ID NO:251 |
| AlaProThr; | |
| ValGluThrValPheHisArgValSerGlnAspGly | SEQ ID NO:252 |
| LeuLeuThrSer; | |
| GlyGlyGlySerGlyGlyGlySerGlyGlyGlySer | SEQ ID NO:253 |
| GluGlyGlyGlySerGluGlyGlyGlySerGluGly | |
| GlyGlySerGluGlyGlyGlySerGlyGlyGlySer; | |
| IleSerGluProSerGlyProIleSerThrIleAsn | SEQ ID NO:254 |
| ProSerProProSerLysGluSerHisLysSer | |
| Pro;, | |
| and | |
| IleGluGlyArgIleSerGluProSerGlyProIle | SEQ ID NO:255 |
| SerThrIleAsnProSerProProSerLysGluSer | |
| HisLysSerPro. | |

[0093] Any purified and isolated ProGP, which is produced by host cells such as E. coli and animal cells transformed or transfected by using recombinant genetic techniques, may be used in the present invention. Among them, ProGP, which is produced by the transformed E. coli, is particularly preferable. Such ProGP may be obtained in large quantities with high purity and homogeneity. For example, the above ProGP may be prepared according to a method disclosed in WO 98/17810. The term “substantially has the following amino acid sequence” means that the above amino acid sequence may include one or more amino-acid changes (deletion, addition, insertion or replacement) as long as such changes will not cause any disadvantageous non-similarity in function to ProGP. It is more preferable to use the ProGP substantially having an amino acid sequence, in which at least one lysine, aspartic acid, glutamic acid, or unpaired cysteine residue is included.

[0094] According to the present invention, poly(ethylene glycol) is covalently bound through amino acid residues of ProGP. The amino acid residue may be any reactive one(s) having, for example, free amino, carboxyl or sulfhydryl (thiol) groups, to which a terminal reactive group of an activated poly(ethylene glycol) may be bound. The amino acid residues having the free amino groups may include lysine residues and/or N-terminal amino acid residue, those having a free carboxyl group may include aspartic acid, glutamic acid and/or C-terminal amino acid residues, and having a sulfhydryl (thiol) such as cysteine.

[0095] In another embodiment, oxine chemistries (Lemieux & Bertozzi Tib Tech 16:506-513, 1998) are used to target N-terminal serine residues.

[0096] The poly(ethylene glycol) used in the present invention is not restricted to any particular form or molecular weight range. Normally a molecular weight of 500-60,000 is used and preferably of from 1,000-40,000. The poly(ethylene glycol) can also be a branched PEG as described in U.S. Pat. No. 5,932,462, U.S. Pat. No. 5,342,940, U.S. Pat. No. 5,643,575, U.S. Pat. No. 5,919,455, U.S. Pat. No. 6,113,906, and U.S. Pat. No. 5,183,660.

[0097] Poly(alkylene oxides), notably poly(ethylene glycol)s, is bound to ProGP via a terminal reactive group, which may or may not leave a linking moiety (spacer) between the PEG and the protein. In order to form the ProGP conjugates of the present invention, polymers such as poly(alkylene oxide) are converted into “activated” forms. The reactive group, for example, is a terminal reactive group, which mediates a bond between chemical moieties on the protein, such as amino, carboxyl or thiol groups, and poly(ethylene glycol). Typically, one or both of the terminal polymer hydroxyl end-groups, (i.e. the alpha and omega terminal hydroxyl groups) are converted into reactive functional groups, which allows covalent conjugation. This process is frequently referred to as “activation” and the poly(ethylene glycol) product having the reactive group is hereinafter referred to as “an activated poly(ethylene glycol)”. Polymers containing both α and ω linking groups are referred to as “bis-activated poly(alkylene oxides)” and are referred to as “bifunctional”. Polymers containing the same reactive group on α and ω terminal hydroxyls are sometimes referred to as “homobifunctional” or “homobis-activated”. Polymers containing different reactive groups on α and ω terminal hydroxyls are sometimes referred to as “heterobifunctional” or “heterobis-activated”. Polymers containing a single reactive group are referred to as “mono-activated” polyalkylene oxides or “mono-functional”. Other substantially non-antigenic polymers are similarly “activated” or “functionalized”.

[0098] The activated polymers are thus suitable for mediating a bond between chemical moieties on the protein, such as α-amino, carboxyl or thiol groups, and poly(ethylene glycol). Bis-activated polymers can react in this manner with two protein molecules or one protein molecule and a reactive small molecule in another embodiment to effectively form protein polymers or protein-small molecule conjugates through cross linkages. Functional groups capable of reacting with either the amino terminal α-amino group or ε-amino groups of lysines found on the ProGP include: carbonates such as the p-nitrophenyl, or succinimidyl; carbonyl-imidazole; azlactones; cyclic imide thiones; isocyanates or isothiocyanates and aldehydes. Functional groups capable of reacting with carboxylic acid groups, reactive carbonyl groups and oxidized carbohydrate moieties on ProGP include; primary amines; and hydrazine and hydrazide functional groups such as the acyl hydrazides, carbazates, semicarbamates, thiocarbazates, etc. Mercapto groups, if available on the ProGP, can also be used as attachment sites for suitably activated polymers with reactive groups such as thiols; maleimides, sulfones, and phenyl glyoxals; see, for example, U.S. Pat. No. 5,093,531, the disclosure of which is hereby incorporated by reference. Other nucleophiles capable of reacting with an electrophilic center include, but are not limited to, for example, hydroxyl, amino, carboxyl, thiol, active methylene and the like.

[0099] In one preferred embodiment of the invention secondary amine or amide linkages are formed using the ProGP N-terminal amino groups or ε-amino groups of lysine and the activated PEG. In another preferred aspect of the invention, a secondary amine linkage is formed between the N-terminal primary amino group of ProGP and single or branched chain PEG aldehyde by reduction with a suitable reducing agent such as NaCNBH₃, NaBH₃, Pyridine Borane etc. as described in Chamow et al., Bioconjugate Chem. 5: 133-140 (1994) and U.S. Pat. No. 5,824,784.

[0100] In another preferred embodiment of the invention, polymers activated with amide-forming linkers such as succinimidyl esters, cyclic imide thiones, or the like are used to effect the linkage between the ProGP and polymer, see for example, U.S. Pat. No. 5,349,001; U.S. Pat. No. 5,405,877; and Greenwald, et al., Crit. Rev. Ther. Drug Carrier Syst. 17:101-161, 2000, which are incorporated herein by reference. One preferred activated poly(ethylene glycol), which may be bound to the free amino groups of ProGP includes single or branched chain N-hydroxysuccinylimide poly(ethylene glycol) may be prepared by activating succinic acid esters of poly(ethylene glycol) with N-hydroxysuccinylimide.

[0101] Other preferred embodiments of the invention include using other activated polymers to form covalent linkages of the polymer with the ProGP via ε-amino or other groups. For example, isocyanate or isothiocyanate forms of terminally activated polymers can be used to form urea or thiourea-based linkages with the lysine amino groups.

[0102] In another preferred aspect of the invention, carbamate (urethane) linkages are formed with protein amino groups as described in U.S. Pat. Nos. 5,122,614, 5,324,844, and 5,612,640, which are hereby incorporated by reference. Examples include N-succinimidyl carbonate, para-nitrophenyl carbonate, and carbonyl imidazole activated polymers. In another preferred embodiment of this invention, a benzotriazole carbonate derivative of PEG is linked to amino groups on ProGP.

[0103] Another aspect of the invention represents a prodrug or sustained release form of ProGP, comprised of a water soluble polymer, such as poly(ethylene glycol), attached to an ProGP molecule by a functional linker that can predictably break down by enzymatic or pH directed hydrolysis to release free ProGP or other ProGP derivative. The prodrug can also be a “double prodrug” (Bundgaard in Advanced Drug Delivery Reviews 3:39-65, 1989) involving the use of a cascade latentiation. In such systems, the hydrolytic reaction involves an initial rate-limiting (slow) enzymatic or pH directed step and a second step involving a rapid non-enzymatic hydrolysis that occurs only after the first has taken place. Such a releasable polymer provides protein conjugates, which are impermanent and could act as a reservoir, that continually discharge ProGP. Such functional linkers are described in U.S. Pat. No. 5,614,549; U.S. Pat. No. 5,840,900; U.S. Pat. No. 5,880,131; U.S. Pat. No. 5,965,119; U.S. Pat. No. 6,011,042; U.S. Pat. No. 6,180,095 B1; Greenwald R. B. et al., J. Med. Chem. 42;3657-3667, 1999; Lee, S. et al., Bioconjugate Chem 12:163-169, 2001; Garman A. J. et al., FEBS Lett. 223:361-365, 1987; Woghiren C. et al., Bioconjucate Chem. 4:314-318, 1993; Roberts M. J. et al., J. Pharm. Sci. 87;1440-1445, 1998; Zhao X., in Ninth Int. Symp. Recent Adv. Drug Delivery Syst. 199; Greenwald R. B. et al., J. Med. Chem. 43:475-487, 2000; and Greenwald R. B. Crit. Rev. Ther. Drug Carrier Syst. 17:101-161, 2000.

[0104] Another embodiment of the present invention is a method of conjugating a PEG to a nucleophile where the conjugation is carried out in the presence of an inorganic solvent. A “nucleophile” is defined as proteins including but not limited to antibodies and hematopoietic growth factors, peptides, enzymes, medicinal chemicals or organic moieties. Preferably the inorganic solvent is acetonitrile, methanol, or ethanol. More preferably the inorganic solvent is acetonitrile. Preferably the inorganic concentration is between about 1% and about 25%, more preferably between about 3% and about 13%, and more preferably about 8%.

[0105] Conjugation reactions, referred to as pegylation reactions, were historically carried out in solution with molar excess of polymer and without regard to where the polymer will attach to the protein. Such general techniques, however, have typically been proven inadequate for conjugating bioactive proteins to non-antigenic polymers while retaining sufficient bioactivity. One way to maintain the ProGP bioactivity is to substantially avoid the conjugation of those ProGP reactive groups associated with the receptor binding site(s) in the polymer coupling process. Another aspect of the present invention is to provide a process of conjugating poly(ethylene glycol) to ProGP maintaining high levels of retained activity.

[0106] The chemical modification through a covalent bond may be performed under any suitable condition generally adopted in a reaction of a biologically active substance with the activated poly(ethylene glycol). The conjugation reaction is carried out under relatively mild conditions to avoid inactivating the ProGP. Mild conditions include maintaining the pH of the reaction solution in the range of 3 to 10 and the reaction temperatures within the range of from about 0°-37° C. In the cases where the reactive amino acid residues in ProGP have free amino groups, the above modification is preferably carried out in a non-limiting list of suitable buffers (pH 3 to 10), including phosphate, citrate, acetate, succinate or HEPES, for 1-48 hrs at 4°-37° C. In targeting N-terminal amino groups with reagents such as PEG aldehydes pH 4-7 is preferably maintained. The activated poly(ethylene glycol) may be used in 0.05-100 times, preferably 0.05-0.5 times, the molar amount of the number of free amino groups of ProGP. On the other hand, where reactive amino acid residues in ProGP have the free carboxyl groups, the above modification is preferably carried out in pH from about 3.5 to about 5.5, for example, the modification with poly(oxyethylenediamine) is carried out in the presence of carbodiimide (pH 4-5) for 1-24 hrs at 4°-37° C. The activated poly(ethylene glycol) may be used in 0.05-300 times the molar amount of the number of free carboxyl groups of ProGP.

[0107] In separate embodiments, the upper limit for the amount of polymer included in the conjugation reactions exceeds about 1:1 to the extent that it is possible to react the activated polymer and ProGP without forming a substantial amount of high molecular weight species, i.e. more than about 20% of the conjugates containing more than about one strand of polymer per molecule of ProGP. For example, it is contemplated in this aspect of the invention that ratios of up to about 6:1 can be employed to form significant amounts of the desired conjugates which can thereafter be isolated from any high molecular weight species.

[0108] In another aspect of this invention, bifunctionally activated PEG derivatives may be used to generate polymeric ProGP-PEG molecules in which multiple ProGP molecules are crosslinked via PEG. Although the reaction conditions described herein can result in significant amounts of unmodified ProGP, the unmodified ProGP can be readily recycled into future batches for additional conjugation reactions. The processes of the present invention generate surprisingly very little, i.e. less than about 30% and more preferably, less than about 10%, of high molecular weight species and species containing more than one polymer strand per ProGP. These reaction conditions are to be contrasted with those typically used for polymeric conjugation reactions wherein the activated polymer is present in several-fold molar excesses with respect to the target. In other aspects of the invention, the polymer is present in amounts of from about 0.1 to about 50 equivalents per equivalent of ProGP. In other aspects of the invention, the polymer is present in amounts of from about 1 to about 10 equivalents per equivalent of ProGP.

[0109] The conjugation reactions of the present invention initially provide a reaction mixture or pool containing mono- and di-PEG-ProGP conjugates, unreacted ProGP, unreacted polymer and usually less than about 20% high molecular weight species. The high molecular weight species include conjugates containing more than one polymer strand and/or polymerized PEG-ProGP species. After the unreacted species and high molecular weight species have been removed, compositions containing primarily mono- and di-polymer-ProGP conjugates are recovered. Given the fact that the conjugates for the most part include a single polymer strand, the conjugates are substantially homogeneous. These modified ProGPs have at least about 5% of the in vitro biological activity associated with the native or unmodified ProGP as measured using standard cell proliferation assays, such as AML, TFl and colony forming unit assays (U.S. Pat. No. 6,030,812 which is incorporated by reference herein). In preferred aspects of the invention, the modified ProGPs have about 25% of the in vitro biological activity, more preferably, the modified ProGPs have about 50% of the in vitro biological activity, more preferably, the modified ProGPs have about 75% of the in vitro biological activity, and most preferably the modified ProGPs have equivalent or improved in vitro biological activity.

[0110] The processes of the present invention preferably include rather limited ratios of polymer to ProGP. Thus, the ProGP conjugates have been found to be predominantly limited to species containing only one strand of polymer. Furthermore, the attachment of the polymer to the ProGP reactive groups is substantially less random than when higher molar excesses of polymer linker are used. The unmodified ProGP present in the reaction pool, after the conjugation reaction has been quenched, can be recycled into future reactions using ion exchange or size exclusion chromatography or similar separation techniques.

[0111] A poly(ethylene glycol)-modified ProGP, namely chemically modified protein according to the present invention,-may be purified from a reaction mixture by conventional methods which are used for purification of proteins, such as dialysis, salting-out, ultrafiltration, ion-exchange chromatography, gel chromatography and electrophoresis. Ion-exchange chromatography is particularly effective in removing unreacted poly(ethylene glycol) and ProGP. In a further embodiment of the invention, the mono- and di-polymer-ProGP species are isolated from the reaction mixture to remove high molecular weight species, and unmodified ProGP. Separation is effected by placing the mixed species in a buffer solution containing from about 0.5-10 mg/mL of the ProGP-polymer conjugates. Suitable solutions have a pH from about 4 to about 10. The solutions preferably contain one or more buffer salts selected from KCl, NaCl, K₂HPO₄, KH₂PO₄, Na₂HPO₄, NaH₂PO₄, NaHCO₃, NaBO₄, CH₃CO₂H, and NaOH.

[0112] Depending upon the reaction buffer, the ProGP polymer conjugate solution may first have to undergo buffer exchange/ultrafiltration to remove any unreacted polymer. For example, the PEG-ProGP conjugate solution can be ultrafiltered across a low molecular weight cut-off (10,000 to 30,000 Dalton) membrane to remove most unwanted materials such as unreacted polymer, surfactants, if present, or the like.

[0113] The fractionation of the conjugates into a pool containing the desired species is preferably carried out using an ion exchange chromatography medium. Such media are capable of selectively binding PEG-ProGP conjugates via differences in charge, which vary in a somewhat predictable fashion. For example, the surface charge of ProGP is determined by the number of available charged groups on the surface of the protein. These charged groups typically serve as the point of potential attachment of poly(alkylene oxide) conjugates. Therefore, ProGP conjugates will have a different charge from the other species to allow selective isolation.

[0114] Strongly polar anion or cation exchange resins such as quaternary amine or sulfopropyl resins, respectively, are used for the method of the present invention. Cation exchange resins are especially preferred. A non-limiting list of included commercially available cation exchange resins suitable for use with the present invention are SP-hitrap®, SP Sepharose HP® and SP Sepharose® fast flow. Other suitable cation exchange resins e.g. S and CM resins can also be used. A non-limiting list of anion exchange resins, including commercially available anion exchange resins, suitable for use with the present invention are Q-hitrap®, Q Sepharose HP®, and Q sepharose® fast flow. Other suitable anion exchange resins, e.g. DEAE resins, can also be used.

[0115] For example, the cation exchange resin is preferably packed in a column and equilibrated by conventional means. A buffer having the same pH and osmolality as the polymer conjugated ProGP solution is used. The elution buffer preferably contains one or more salts selected from KCl, NaCl, K₂HPO₄, KH₂PO₄, Na₂HPO₄, NaH₂PO₄, NaHCO₃, NaBO₄ and (NH₄)₂CO₃. The conjugate-containing solution is then adsorbed onto the column with unreacted polymer and some high molecular weight species not being retained. At the completion of the loading, a gradient flow of an elution buffer with increasing salt concentrations is applied to the column to elute the desired fraction of polyalkylene oxide-conjugated ProGP. The eluted pooled fractions are preferably limited to uniform polymer conjugates after the cation exchange separation step. Any unconjugated ProGP species can then be back washed from the column by conventional techniques. If desired, mono and multiply pegylated ProGP species can be further separated from each other via additional ion exchange chromatography or size exclusion chromatography. Techniques utilizing multiple isocratic steps of increasing concentration can also be used. Multiple isocratic elution steps of increasing concentration will result in the sequential elution of di- and then mono-ProGP-polymer conjugates.

[0116] The temperature range for elution is between about 4° C. and about 25° C. Preferably, elution is carried out at a temperature of from about 6° C. to about 22° C. For example, the elution of the PEG-ProGP fraction is detected by UV absorbance at 280 nm. Fraction collection may be achieved through simple time elution profiles.

[0117] A surfactant can be used in the processes of conjugating the poly(ethylene glycol) polymer with the ProGP moiety. Suitable surfactants include ionic-type agents such as sodium dodecyl sulfate (SDS). Other ionic surfactants such as lithium dodecyl sulfate, quaternary ammonium compounds, taurocholic acid, caprylic acid, decane sulfonic acid, etc. can also be used. Non-ionic surfactants can also be used. For example, materials such as poly(oxyethylene) sorbitans (Tweens), poly(oxyethylene) ethers (Tritons) can be used. See also Neugebauer, A Guide to the Properties and Uses of Detergents in Biology and Biochemistry (1992) Calbiochem Corp. The only limitations on the surfactants used in the processes of the invention are that they are used under conditions and at concentrations that do not cause substantial irreversible denaturation of the ProGP and do not completely inhibit polymer conjugation. The surfactants are present in the reaction mixtures in amounts from about 0.01-0.5%; preferably from 0.05-0.5%; and most preferably from about 0.075-0.25%. Mixtures of the surfactants are also contemplated.

[0118] It is thought that the surfactants provide a temporary, reversible protecting system during the polymer conjugation process. Surfactants have been shown to be effective in selectively discouraging polymer conjugation while allowing lysine-based or amino terminal-based conjugation to proceed.

[0119] The present poly(ethylene glycol)-modified ProGP has a more enduring pharmacological effect, which may be possibly attributed to its prolonged half-life in vivo.

[0120] An intended use of the PEG-ProGP of the present invention is for the generation of larger numbers of dendritic cells, from precursors, to be used as adjuvants for immunization. Dendritic cells play a crucial role in the immune system. They are the professional antigen-presenting cells most efficient in the activation of resting T cells and are the major antigen-presenting cells for activation of naive T cells in vivo and, thus, for initiation of primary immune responses. They efficiently internalize, process and present soluble tumor-specific antigens (Ag). Dendritic cells have the unique capacity to cluster naive T cells and to respond to Ag encounter by rapid up-regulation of the expression of major histocompatibility complex (MHC) and co-stimulatory molecules, the production of cytokines and migration towards lymphatic organs. Since dendritic cells are of central importance for sensitizing the host against a neoantigen for CD4-dependent immune responses, they may also play a crucial role in the generation and regulation of tumor immunity.

[0121] Dendritic cells originate from a bone marrow CD34+ precursor common to granulocytes and macrophages, and the existence of a separate dendritic cell colony-forming unit (CFU-DC) that give rise to pure dendritic cell colonies has been established in humans. In addition, a post-CFU CD14+ intermediate has been described with the potential to differentiate along the dendritic cell or the macrophage pathway under distinct cytokine conditions. This bipotential precursor is present in the bone marrow, cord blood, and peripheral blood. Dendritic cells can be isolated based on specific cell surface markers, such as CD1a+, CD3−, CD4−, CD20−, CD40+, CD80+, and CD83+, to delineate the maturation of cultured dendritic cells.

[0122] Dendritic cells based strategies provide a method for enhancing immune response against tumors and infectious agents. AIDS is another disease for which dendritic cell based therapies can be used, since dendritic cells can play a major role in promoting HIV-1 replication. An immunotherapy requires the generation of dendritic cells from cancer patients, their in vitro exposure to tumor Ag, derived from surgically removed tumor masses, and reinjection of these cells into the tumor patients. Relatively crude membrane preparations of tumor cells will suffice as sources of tumor antigen, avoiding the necessity for molecular identification of the tumor antigen. The tumor antigen may also be synthetic peptides, carbohydrates, or nucleic acid sequences. In addition, concomitant administration of cytokines such as the PEG-ProGP of the present invention may further facilitate the induction of tumor immunity. It is foreseen that the immunotherapy can be in an in vivo setting, wherein the PEG-PrOGP of the present invention is administered to a patient, having a tumor, alone or with other hematopoietic growth factors to increase the number of dendritic cells and endogenous tumor antigen is presented on the dendritic cells. It is also envisioned that in vivo immunotherapy can be with exogenous antigen. It is also envisioned that the immunotherapy treatment may include the mobilization of dendritic cell precursors or mature dendritic, by administering the PEG-ProGP of the present invention alone or with other hematopoietic growth factors to the patient, removing the dendritic cell precursors or mature dendritic cells from the patient, exposing the dendritic cells to antigen and returning the dendritic cells to the patient. Furthermore, the dendritic cells that have been removed can be cultured ex vivo with the PEG-ProGP of the present invention alone or with other hematopoietic growth factors to increase the number of dendritic cells prior to exposure to antigen. Dendritic cells based strategies also provide a method for reducing the immune response in autoimmune diseases.

[0123] Studies on dendritic cells have been greatly hampered by difficulties in preparing the cells in sufficient numbers and in a reasonably pure form. In an ex-vivo cell expansion setting, granulocyte-macrophage colony-stimulating factor (GM-CSF) and tumor necrosis factor-α (TNF-α) cooperate in the ex vivo generation of dendritic cells from hematopoietic progenitors (CD34+ cells) retrieved from bone marrow, cord blood, or peripheral blood and flk-2/flt-3 ligand and c-kit ligand (stem cell factor [SCF]) synergize to enhance the GM-CSF plus TNF-α induced generation of dendritic cells (Siena, S. et al. Experimental Hematology 23:1463-1471, 1995). Also provide is a method of ex vivo expansion of dendritic cell precursors or mature dendritic cells using the PEG-ProGP of the present invention to provide sufficient quantities of dendritic cells for immunotherapy.

[0124] Furthermore, it is observed that the present poly(ethylene glycol)-modified ProGP may accelerate recovery from neutropenia. The present poly(ethylene glycol)-modified ProGP may have essentially the same biological activity as an intact ProGP and may accordingly be used in the same applications. The poly(ethylene glycol)-modified ProGP has an activity for increasing the number of neutrophils, and it is useful therefore in the treatment of general hematopoietic disorders including those arising from chemotherapy or from radiation therapy. It may be also useful in the treatment of infection and in bone marrow transplantation. The modified ProGP of the present invention may be useful in the treatment of diseases characterized by decreased levels of either myeloid, erythroid, lymphoid, or megakaryocyte cells of the hematopoietic system or combinations thereof. In addition, they may be used to activate mature myeloid and/or lymphoid cells. Among conditions susceptible to treatment with the polypeptides of the present invention is leukopenia, a reduction in the number of circulating leukocytes (white cells) in the peripheral blood. Leukopenia may be induced by exposure to certain viruses or to radiation. It is often a side effect of various forms of cancer therapy, e.g., exposure to chemotherapeutic drugs, radiation and of infection or hemorrhage. Therapeutic treatment of leukopenia with these modified ProGP of the present invention may avoid undesirable side effects caused by treatment with presently available drugs.

[0125] The modified ProGP of the present invention may be useful in the treatment or prevention of neutropenia and, for example, in the treatment of such conditions as aplastic anemia, cyclic neutropenia, idiopathic neutropenia, Chediak-Higashi syndrome, systemic lupus erythematosus (SLE), leukemia, myelodysplastic syndrome and myelofibrosis.

[0126] The modified ProGP of the present invention may be useful in the treatment or prevention of thrombocytopenia. Currently the only therapies for thrombocytopenia are platelet transfusions, which are costly and carry the significant risks of infection (HIV, HBV) and alloimmunization, and IL-11 (Neumega™) that is approved for certain thrombocytopenia. The modified ProGP may alleviate or diminish the need for platelet transfusions. Severe thrombocytopenia may result from genetic defects such as Fanconi's Anemia, Wiscott-Aldrich, or May-Hegglin syndromes. Acquired thrombocytopenia may result from auto- or allo-antibodies as in Immune Thrombocytopenia Purpura, Systemic Lupus Erythematosis, hemolytic anemia, or fetal maternal incompatibility. In addition, splenomegaly, disseminated intravascular coagulation, thrombotic thrombocytopenic purpura, infection, or prosthetic heart valves may result in thrombocytopenia. Severe thrombocytopenia may also result from chemotherapy and/or radiation therapy or cancer. Thrombocytopenia may also result from marrow invasion by carcinoma, lymphoma, leukemia, or fibrosis.

[0127] The modified ProGP of the present invention may be useful in the mobilization of hematopoietic progenitors and stem cells into peripheral blood. Peripheral blood derived progenitors have been shown to be effective in reconstituting patients in the setting of autologous marrow transplantation. Hematopoietic growth factors including G-CSF and GM-CSF have been shown to enhance the number of circulating progenitors and stem cells in the peripheral blood. This has simplified the procedure for peripheral stem cell collection and dramatically decreased the cost of the procedure by decreasing the number of phereses required. The modified ProGP may be useful in mobilization of stem cells and further enhance the efficacy of peripheral stem cell transplantation.

[0128] Another projected clinical use of growth factors has been in the in vitro activation of hematopoietic progenitors and stem cells for gene therapy. In order to have the gene of interest incorporated into the genome of the hematopoietic progenitor or stem cell one needs to stimulate cell division and DNA replication. Hematopoietic stem cells cycle at a very low frequency, which means that growth factors may be useful to promote gene transduction and thereby enhance the clinical prospects for gene therapy.

[0129] Many drugs may cause bone marrow suppression or hematopoietic deficiencies. Examples of such drugs are AZT, DDI, alkylating agents and anti-metabolites used in chemotherapy, antibiotics such as chloramphenicol, penicillin, gancyclovir, daunomycin and sulfa drugs, phenothiazones, tranquilizers such as meprobamate, analgesics such as aminopyrine and dipyrone, anti-convulsants such as phenytoin or carbamazepine, antithyroids such as propylthiouracil and methimazole and diuretics. The modified ProGP of the present invention may be useful in preventing or treating the bone marrow suppression or hematopoietic deficiencies, which often occur in patients treated with these drugs.

[0130] Hematopoietic deficiencies may also occur because of viral, microbial, or parasitic infections and as a result of treatment for renal disease or renal failure, e.g., dialysis. The modified ProGP of the present invention may be useful in treating such hematopoietic deficiency.

[0131] The treatment of hematopoietic deficiency may include administration of a pharmaceutical composition containing the modified ProGP to a patient. The modified ProGP of the present invention may also be useful for the activation and amplification of hematopoietic precursor cells by treating these cells in vitro with the modified ProGP of the present invention prior to injecting the cells into a patient.

[0132] Various immunodeficiencies e.g., in T and/or B-lymphocytes, or immune disorders, e.g., rheumatoid arthritis, may also be beneficially affected by treatment with the modified ProGP of the present invention. Immunodeficiencies may be the result of viral infections e.g. HTLV-I, HTLV-II, HTLV-III, severe exposure to radiation, cancer therapy or the result of other medical treatment. The modified ProGP of the present invention may also be employed, alone or in combination with other hematopoietins, in the treatment of other blood cell deficiencies, including thrombocytopenia (platelet deficiency), or anemia. Other uses for these novel polypeptides are in the treatment of patients recovering from bone marrow transplants in vivo and ex vivo, and in the development of monoclonal and polyclonal antibodies generated by standard methods for diagnostic or therapeutic use.

[0133] The present poly(ethylene glycol)-modified ProGP may be formulated into pharmaceuticals containing also a pharmaceutically acceptable diluent, an agent for preparing an isotonic solution, a pH-conditioner and the like in order to administer them into a patient. The above pharmaceuticals may be administered subcutaneously, intramuscularly, intravenously, or orally, depending on a purpose of treatment. A dose may be also based on the kind and condition of the disorder of a patient to be treated, being normally between 0.1 mg and 50 mg by injection and between 0.1 mg and 5 g in an oral administration for an adult

[0134] The polymeric substances included are also preferably water-soluble at room temperature. A non-limiting list of such polymers include poly(alkylene oxide) homopolymers such as poly(ethylene glycol) or poly(propylene glycols), poly(oxyethylenated polyols), copolymers thereof and block copolymers thereof, provided that the water solubility of the block copolymers is maintained.

[0135] As an alternative to PEG-based polymers, effectively non-antigenic materials such as dextran, poly(vinyl pyrrolidones), poly(acrylamides), poly(vinyl alcohols), carbohydrate-based polymers, and the like can be used. Indeed, the activation of α- and ω-terminal groups of these polymeric substances can be effected in fashions similar to that used to convert poly(alkylene oxides) and thus will be apparent to those of ordinary skill. Those of ordinary skill in the art will realize that the foregoing list is merely illustrative and that all polymer materials having the qualities described herein are contemplated. For purposes of the present invention, “effectively non-antigenic” means all materials understood in the art as being nontoxic and not eliciting an appreciable immunogenic response in mammals.

### DEFINITIONS

[0136] The following is a list of abbreviations and the corresponding meanings as used interchangeably herein:

| | |
|---|---|
| g | gram(s) |
| mg | milligram(s) |
| ml or mL | milliliter(s) |
| RT | room temperature |
| PEG | poly (ethylene glycol) |

[0137] The complete content of all publications, patents, and patent applications cited in this disclosure are herein incorporated by reference as if each individual publication, patent, or patent application were specifically and individually indicated to be incorporated by reference.

[0138] Although the foregoing invention has been described in some detail by way of illustration and example for the purposes of clarity of understanding, it will be readily apparent to one skilled in the art in light of the teachings of this invention that changes and modifications can be made without departing from the spirit and scope of the present invention. The following examples are provided for exemplification purposes only and are not intended to limit the scope of the invention, which has been described in broad terms above.

[0139] In the following examples, the ProGP polypeptide is that of ProGP-4, the amino acid sequence for which is shown in FIG. 12. It is understood that other members of the ProGP family of polypeptides could also be pegylated in a similar manner as exemplified in the subsequent examples.

### EXAMPLES

### Example 1

[0140] Straight Chain 30,000 MW PEG-ProGP [chemical structure]
[0141] PEG-Aldehyde 5,20 and 30,000 MW

[0142] This example demonstrates a method for generation of substantially homogeneous preparations of N-terminally monopegylated ProGP by reductive alkylation. Methoxy-linear PEG-propionaldehyde reagent of approximately 30,000 MW (Shearwater Polymers Inc.) was selectively coupled via reductive amination to the N-terminus of ProGP by taking advantage of the difference in the relative pKₐ value of the primary amine at the N-terminus versus pKₐ values of primary amines at the ε-amino position of lysine residues. ProGP protein dissolved at 1-5 mg/mL in 10 mM sodium Succinate, pH 5.0, or in 10 mM sodium succinate (J. T. Baker, Phillipsburg, N.J.), 8% acetonitrile (Burdick and Jackson, Muskegon, Mich.), pH 5.0, was reacted with Methoxy-PEG-propionaldehyde, M-PEG-ALD, (Shearwater Polymers Inc., Huntsville, Ala.) by addition of solid M-PEG-ALD to yield a relative PEG:ProGP (dimer) molar ratio of 2-12:1. Reactions were catalyzed by addition of stock 1M NaCNBH₄ (Sigma Chemical, St. Louis, Mo.) dissolved in H₂O to a final concentration of 10 mM. Reactions were carried out in the dark at 4° C. for 18-24 hours. Reactions were stopped by addition of 1 M Tris base (Sigma Chemical, St. Louis, Mo.) to a final Tris concentration of 50 mM and a final pH of 8.5.

### Example 2

Straight Chain 20,000 MW PEG-ProGP

[0143] Methoxy-linear 20,000 MW PEG-propionaldehyde reagent (Shearwater Polymers Inc.) was coupled to the N-terminus of ProGP using the procedure described for Example 1.

### Example 3

Straight chain 5,000 MW PEG-ProGP

[0144] Methoxy-linear 5,000 MW PEG-propionaldehyde reagent (Fluka) was coupled to the N-terminus of ProGP using the procedure described for Example 1.

### Example 4

[0145] Branched chain 40,000 MW PEG-ProGP [chemical structure]
[0146] PEG2-ALD 40,000 MW

[0147] Methoxy-branched 40,000 MW PEG-propionaldehyde (PEG2-ALD) reagent (Shearwater Polymers Inc.) was coupled to the N-terminus of ProGP using the procedure described for Example 1.

### Example 5

[0148] Straight chain 20,000 MW PEG-ProGP [chemical structure]
[0149] SPA-PEG 5 and 20,000 MW

[0150] This example demonstrates a method for generation of substantially homogeneous preparations of monopegylated Progenipoietin (ProGP) using N-hydroxysuccinimidyl (NHS) active esters. ProGP protein stock solution is dissolved at 1-5 mg/mL in 10 mM sodium Succinate, pH 5.0, is titrated to pH 7.2 by addition of 0.25 M HEPES buffer. The solution is then reacted with Methoxy-PEG-succinimidyl propionate (SPA-PEG) by addition of solid SPA-PEG to yield a relative PEG:Progenipoietin molar ratio of 6.5:1. Reactions are carried out at 4° C. for 1 hour. Reactions are stopped by lowering the pH to 4.0 with 0.1 N acetic acid or by adding a SX molar excess of Tris HCl. In a like manner CM-HBA-NHS 5 to 20,000 MW PEG could be used.

[chemical structure]

### Example 6

[0151] Straight Chain 3,400 MW Biotin-PEG-ProGP [chemical structure]
[0152] Biotin-PEG-NHS 3,400 MW

[0153] 3,400 MW Biotin-PEG-CO₂-NHS reagent (Shearwater Polymers Inc.) is coupled to ProGP using the procedure described for Example 5.

### Example 7

[0154] Branched 10,000 MW PEG-ProGP [chemical structure]
[0155] PEG2-NHS 10, 20 and 40,000 MW

[0156] 10,000 MW branched PEG2-NHS (Shearwater Polymers Inc.) is coupled to ProGP using the procedure described for Example 5.

### Example 8

Branched 20,000 MW PEG-ProGP

[0157] 20,000 MW branched PEG2-SPA (Shearwater Polymers Inc.) is coupled to ProGP using the procedure described for Example 5.

### Example 9

Branched 40,000 MW PEG-ProGP

[0158] 40,000 MW branched PEG2-SPA (Shearwater Polymers Inc.) is coupled to ProGP using the procedure described for Example 5.

### Example 10

[0159] Straight Chain 20,000 MW PEG-ProGP [chemical structure]
[0160] BTC-PEG 20,000 MW

[0161] 20,000 MW PEG-BTC (Shearwater Polymers Inc.) is coupled to ProGP using the procedure described for Example 4. This example demonstrates a method for generation of substantially homogeneous preparations of pegylated Progenipoietin (ProGP) using benzotriazole carbonate derivatives of PEG.

### Example 11

[0162] Straight Chain 5,000 MW PEG-ProGP [chemical structure]
[0163] PEG-SS 5,000 MW

[0164] 5,000 MW succinimidyl succinate-PEG (SS-PEG)(Shearwater Polymers Inc.) is coupled to ProGP using the procedure described for Example 5. This example demonstrates a method for generation of substantially homogeneous preparations of pegylated Progenipoietin (ProGP) using a hydrolyzable linkage.

### Example 12

[0165] Straight Chain 20,000 MW PEG-ProGP [chemical structure]
[0166] PEG-Hydrazide 20,000 MW

[0167] This example demonstrates a method for generation of substantially homogeneous preparations of pegylated Progenipoietin (ProGP) using 20,000 MW methoxy-PEG-hydrazide, HZ-PEG (Shearwater Polymers Inc.). ProGP protein stock solution is dissolved at 1-5 mg/mL in 10 mM sodium Succinate, pH 5.0. The solution is then reacted with HZ-PEG by addition of solid to yield a relative PEG:Progenipoietin molar ratio of 6.5-26:1 reactions are catalyzed with carbodiimide (EDC, EOAC) at a final concentration of 2 mM. Reactions are carried out at 4° C. for 2 hours. Reactions are stopped by lowering the pH to 4 with 0.1 N acetic acid.

### Examples 13

Multi-pegylated Species

[0168] Modified ProGPs having two or more PEGs (multi-pegylated) attached were also obtained from Example 1-4 and were separated from the mono-pegylated species using anion exchange chromatography. Modified ProGPs having two or more PEGs (multi-pegylated) attached are also separated from mono-PEGylated species using cation exchange chromatography.

[0169] Modified ProGPs having two or more PEGs (multi-pegylated) attached can also be obtained from examples 5-13 and can be purified in similar fashion to examples 1-4.

### Example 14

Purification of Pegylated ProGP

[0170] Pegylated ProGP species were purified from the reaction mixture to >95% (SEC analysis) using a single ion exchange chromatography step

Anion Exchange Chromatography

[0171] Mono-Pegylated 30K 20K and 5K PEG aldehyde ProGP species were purified from the reaction mixture to >95% (SEC analysis) using a single anion exchange chromatography step. Mono-Pegylated ProGP was purified from unmodified ProGP and multi-PEGylated ProGP species using anion exchange chromatography (FIG. 1). A typical 30K aldehyde ProGP reaction mixture (50-350 mg protein), as described above, was purified on a Q-Sepharose High Performance column (XK 26/20, 70 ml bed volume, Amersham Pharmacia Biotech, Piscataway, N.J.) equilibrated in 50 mM Tris, pH 8.5 (Buffer A). The reaction mixture was diluted 5× with 50 mM Tris, 8% Acetonitrile, pH 8.5 and loaded onto the column at a flow rate of 10 mL/min. The column was washed with 5 column volumes of buffer A, followed by 5 column volumes of buffer A containing 30 mM NaCl. Subsequently, the various ProGP species were eluted from the column in 20 column volumes of Buffer A and a linear NaCl gradient of 30-130 mM. The eluant was monitored by absorbance at 280 nm (A₂₈₀) and 12 mL fractions were collected. Fractions were pooled as to extent of pegylation, e.g., mono, di, tri etc. (as assessed in example 15). The pH of the pool was lowered to 7.5 using 1M HCl, and the pool was then concentrated to 1-5 mg/mL in an 10 K Omegacell stirred cell concentrator (Filtron Technology Corporation, Northborough, Mass.). Protein concentration of pool was determined by A₂₈₀ using an extinction coefficient of 0.97%. Total yield of purified mono 30 K PEG-aldehyde ProGP from this process was 25-30%.

Cation Exchange Chromatography

[0172] Cation exchange chromatography is carried out on an SP Sepharose high performance column (Pharmacia XK 26/20, 70 ml bed volume) equilibrated in 10 mM sodium acetate pH 4.5 (Buffer C). The reaction mixture is diluted 10× with buffer C and loaded onto the column at a flow rate of 5 mL/min. Next the column is washed with 5 column volumes of buffer C, followed by 5 column volumes of 12% buffer D (10 mM acetate pH 4.5, 1 M NaCl). Subsequently, the PEG-ProGP species are eluted from the column with a linear gradient of 12 to 27% buffer D in 20 column volumes. The eluant is monitored at 280 nm and 10 mn fractions are collected. Fractions are pooled according to extent of pegylation (mono, di, tri etc.), exchanged into 10 mM acetate pH 4.5 buffer and concentrated to 1-5 mg/mL in a stirred cell fitted with an Amicon YM10 membrane. Protein concentration of pool was determined by A280 nm using an extinction coefficient of 0.71. Total yield of monopegylated ProGP from this process is 10 to 50%.

### Example 15

### Biochemical Characterization

[0173] The purified pegylated ProGP pools were characterized by SDS-PAGE (FIG. 3), Non denaturing and denaturing Size Exclusion Chromatography (FIG. 2,4), RP HPLC (FIG. 5), Tryptic mapping (FIG. 7), and MALDI-TOF 6).

Size Exclusion High Performance Liquid Chromatography (SEC-HPLC)

Non-denaturing SEC-HPLC

[0174] The reaction of 30K Methoxy-PEG propionaldehyde with ProGP, anion exchange purification, and final purified products were assessed using non-denaturing SEC-HPLC (FIG. 2a, 2b). Analytical non-denaturing SEC-HPLC was carried out using a Superdex 200 HR 10/30 column (Amersham Pharmacia Biotech, Piscataway, N.J.) in 50 mM Tris pH 7.5, 150 mM NaCl at a flow rate of 0.4 mL/minute.

[0175] PEGylation greatly increases the hydrodynamic volume of the protein resulting in a shift to an earlier retention time. Two PEGylated species were observed in the 30K PEG aldehyde ProGP reaction mixture along with unmodified ProGP. These PEGylated and non-PEGylated species were separated on Q-Sepharose chromatography (FIG. 1), and the resultant purified mono 30K PEG-Aldehyde ProGP) was subsequently shown to elute as a single peak on non-denaturing SEC (>95% purity, FIG. 2c). The Q-Sepharose chromatography step effectively removed free PEG, non-PEGylated ProGP dimer and multi PEGylated species from the mono-Pegylated ProGP.

Denaturing SDS SEC-HPLC

[0176] Denaturing SDS SEC, which disassociates the non-covalent ProGP dimer, was used to demonstrate that mono 30K PEG aldehyde ProGP is only PEGylated on one subunit (monomer) of the ProGP dimer (FIG. 4). Denaturing SEC-HPLC was carried out in the same fashion as described for non-denaturing SEC-HPLC with the exception that 0.1% SDS was included in the running buffer. Protein elution was followed by monitoring the absorbance at 220 nm. Purified mono 30K PEG aldehyde ProGP, which elutes as a single peak on non-denaturing SEC, is separated into a PEGylated subunit and a non-PEGylated subunit (as identified below) under denaturing conditions.

SDS PAGE

[0177] SDS-PAGE which disassociates the non-covalent ProGP dimer, was used to demonstrate purity and that mono 30K PEG aldehyde ProGP is only PEGylated on one subunit (monomer) of the ProGP dimer (FIG. 3). SDS-PAGE was carried out on 1 mm thick 12% Tris glycine gels (Invitrogen, Carlsbad, Calif.) under reducing and non-reducing conditions and stained using a Novex Colloidal Coomassie™ G-250 staining kit gels (Invitrogen, Carlsbad, Calif.). Purified mono-30K PEG aldehyde ProGP, which elutes as a single peak on non-denaturing SEC, is separated into a PEGylated subunit and a non-PEGylated subunit.

Reversed Phase HPLC (RP HPLC)

[0178] RP HPLC was carried out on a Phenomenex Jupiter C₁₈ column (4.6×250 mm, 5 μm particle size) at a temperature of 50° C. samples were loaded onto the column equilibrated in 40% acetonitrile, 0.1% TFA at 1 mL/min. The column was washed with 3 mL 58% acetonitrile. Subsequently, the protein was eluted with a gradient from 58 to 63% acetonitrile over 27 minutes. Preparative and analytical RP-HPLC was carried out on a Jupiter C₁₈ column, 4.6×250 mm, 5mm particle size, (Phenomenex, Torrance, Calif.) at a temperature of 50° C. Samples were loaded onto the column equilibrated in 40% acetonitrile, 0.1% TFA at 1 mL/min. The column was washed with 3 mL 58% acetonitrile. Subsequently, the protein was eluted with a gradient from 58 to 63% acetonitrile over 27 minutes. The eluent was monitored for absorbance at 214 nm. Purified PEG-ProGP, which elutes as a single peak on non-denaturing SEC, is separated (FIG. 5) into a PEGylated subunit and a non-PEGylated subunit (as identified below) under denaturing conditions. In order to confirm the identity of each species, peaks from RP-HPLC elution (FIG. 5) were collected for MALDI-TOF MS and N-terminal sequencing experiments.

N-terminal Sequence and Peptide Mapping

[0179] Automated Edman degradation chemistry was used to determine the NH2-terminal protein sequence (SOP 400.324). An Applied Biosystems Model 494 Procise sequencer (Perkin Elmer, Wellesley, Mass.) was employed for the degradation. The respective PTH-AA derivatives were identified by RP-HPLC analysis in an on-line fashion employing an Applied Biosystems Model 140C PTH analyzer fitted with a Perkin Elmer/Brownlee 2.1 mm i.d. PTH-C18 column. N-terminal sequencing of the RP-HPLC peak (FIG. 5) corresponding to the correct mass for PEG-ProGP resulted in two signals. A major signal (approximately 75% yield) had the expected sequence for PEG-ProGP except for the absence of the N-terminal amino acid. This result is as expected for a N-terminally PEGylated protein. The residue of the first cycle is unrecoverable due to the attached PEG moiety. A minor signal (approximately 25% yield) had the correct N-terminal amino acid sequence. Considering that the peak collected off the RP-HPLC is 100% PEGylated, these data suggest that 75% of the PEG modification is at the N-terminus with remainder apparently linked to one of several possible lysine residues.

Tryptic Digest

[0180] PEGylated ProGP was digested at 1 mg/mL with trypsin (Promega) Dulbecco's modified PBS (Pierce), 10 mM Tris, pH 7.5 (Sigma) Trypsin at 50:1, reconstituted in 40% ACN (B&J), 0.1% TFA (Pierce). Following digestion overnight at 37°, a second aliquot of trypsin was added and the solution again digested overnight at 37°. Digestion was terminated with 5% 1.0 N HCl (Fisher), and, when necessary, the digest was stored at 4° until use. 175 μg was injected onto a TosoHaas 3000PW column equilibrated in 35% ACN, 0.1% TFA at 0.5 mL/min, and eluted over 50 minutes (FIG. 7). Fractions were collected manually from 0 to 25 minutes. The fraction containing PEGylated fragments were sequenced by Edman chemistry. The results indicated that about 77% of the PEG conjugation occurred at the alpha amino group on the N-terminal alanine, with the remaining 23% distributed as 14% at K284, 5% at K201, and 4% at K252. Matrix Assisted Laser Desorption Ionization Time of Flight Mass Spectrometry (MALDI-TOF MS)

[0181] RP-HPLC purified PEGylated, non-PEGylated monomers of ProGP were concentrated, and approximately 1 μL of the concentrate was spotted onto a MALDI target with 3,5-dimethoxy-4-hydroxy-cinnamic acid as the matrix. Spectra were obtained using a Perseptive Biosystems Voyager MALDI-TOF (Perseptive Biosystems,)by monitoring positive ions in the linear mode. One hundred twenty three scans were collected and averaged. Masses were calculated using BSA as a standard. MALDI-TOF MS confirmed the correct masses for each subunit as mono-30K PEGylated-ProGP-4 (PEG-ProGP) monomer (FIG. 6) and non-PEGylated ProGP-4 monomer (data not shown). The early eluting peak had a molecular mass of 71,000 kDa corresponding to 32,000 kDa PEG plus 39,000 kDa ProGP-4. The late eluting peak had correct the molecular mass (39,000 kDa ) for ProGP-4.

### Example 16

BAF3/G-CSFR Cell Proliferation Assay

[0182] Mouse BaF3 cell lines transfected with genes encoding the human G-CSF receptor (mBaF3/hG-CSFR) were used to examine hG-CSF agonist activity. mBaF3/hG-CSFR cells were seeded at 2.5×10⁴ cells/well in 96 well microtiter plates containing serial dilution of ProGP and PEGylated ProGP. Cells were pulsed at T₅₆ hours with [methyl-³H]-thymidine at 0.5 mCi per well for 18 hours. Plates were harvested onto glass fiber filter mats, and the incorporated radioactivity was measured by scintillation spectroscopy. The assay medium for the cell lines consisted of IMDM supplemented with bovine serum albumin (BSA) (Boehringer Mannheim, Indianapolis, Ind.), 500 μg/ml, human transferrin (Sigma, St. Louis, Mo.), 100 μg/ml, a lipid substitute consisting of 2.5 mg of phosphatidyl choline/ml of BSA and 50 mM 2-mercaptoethanol. The G-CSF receptor agonist activity of PEG-ProGP was enhanced when compared to ProGP-4 (Table 1). EC₅₀ value for PEG-ProGP (0.005 nM) was approximately 4 fold lower (p<0.05) than that determined for ProGP-4 (0.021 nM).

### Example 17

BAF3/Flt3 Cell Proliferation Assay

[0183] A chimeric Flt3/G-CSF receptor molecule was constructed using the extracellular and transmembrane domains of human Flt3, a human IL-3 leader sequence, and the cytoplasmic domain of human G-CSF receptor. The resulting construct was used to transfect the mouse lymphoid cell line Baf/3. The protocol described produced stable clones of Baf/3 that proliferated in response to human FL but not to other human cytokines tested. This clonal line was used to analyze the Flt3 agonist activity of ProGP and pegylated ProGP. Cells were seeded at 2.5×10⁴ cells/well in 96 well microtiter plates containing serial dilutions of each growth factor in serum free IMDM, human transferrin (100 μg/ml), lipid substitute of 2.5 mg phosphatidyl choline/ml bovine serum albumin (500 μg/ml), and 2-mercaptoethanol (50 m). After 56 hr, cells were pulsed with methyl ³H thymidine at 0.5 μCi per well for 14-18 hr, harvested and incorporated radioactivity was measured by scintillation spectroscopy. The PEGylated forms of ProGP maintained the biological activity of ProGP-4 (Table 1).

TABLE 1
Comparison of ProGP-4 and 30K PEG ALD ProGP-4
(Example 1) Induced Cell Proliferation

| | BAF3/Flt | | BAF3/G-CSF | |
|---|---|---|---|---|
| | Average | Average | Average | Average |
| | EC₅₀ | Rel. | EC₅₀ | Rel. |
| | (n = 12) | Potency | (n = 9) | Potency |
| r-hG- | >200 | n/a | 0.025 ± | 1.00 |
| CSF | | | 0.010 | |
| r-hFlt3 | 0.03 ± | 1.00 | >2.0 | n/a |
| | 0.03 | | | |
| ProGP | 0.25 ± | 0.16 ± | 0.021 ± | 1.16 ± |
| | 0.17† | 0.17 | 0.013† | 0.98 |
| Peg | 0.63 ± | 0.05 ± | 0.005 ± | 8.37 ± |
| ProGP-4 | 0.48† | 0.03 | 0.003† | 5.78 |

### Example 18

CFU-GM Clonogenic Assays

[0184] Expansion of hematopoietic progenitors was demonstrated using human bone marrow -derived CD34+ cells in a colony forming unit granulocyte/macrophage (CFU-GM) assay, where clonogenic progenitors divide and differentiate in a semi-solid media in response to growth factors. Fresh bone marrow (BM) aspirates were obtained through a collaboration with the St. Louis University Medical School. Mononuclear cell fractions were recovered following density gradient centrifugation with Ficoll-Hypaque. CD34⁺ (stem and progenitor) cells were subsequently isolated by positive selection using the Isolex 50 stem cell reagent kit (Baxter Healthcare Corporation, Deerfield, Ill.). This procedure yields an enriched cellular product where >90% of the cells express the CD34+ cell surface antigen. These CD34⁺ cells were seeded in 35 mm tissue culture plates (10,000 cells/dish) in MethoCult H4230 (StemCell Technologies, Vancouver, BC) containing 0.9% Methylcellulose in Iscove's modified Dulbecco's medium (IMDM), 30% FBS, 1% BSA, 1 mM 2-mercaptoethanol and 2 mM L-glutamine.

[0185] Cultures were incubated with growth factors for 10-12 days at 37° C. in humidified air containing 5% CO₂. The concentrations of the respective receptor agonists in co-addition experiments are equimolar each at the indicated concentration value. Hematopoietic colonies (>50 cells) were counted using an inverted microscope. The Peg ProGP induced differentiation and expansion of hematopoietic progenitor cells into colony forming unit granulocyte/macrophage cells (CFU-GM) was equal to the response elicited from ProGP-4 or co-administration of human flt3 ligand and hG-CSF (FIG. 8).

### Example 19

Growth Factor Administration For Pharmacokinetics (PK)

[0186] Female C57BL/6 (8-12 wk old, Charles River, Raleigh, N.C.) mice were housed in the Pharmacia animal facility. ProGP and Pegylated ProGP were diluted in PBS (Life Technologies, Grand Island, N.Y.) and administered to mice at a dose of 100 μg/injection. Mice were injected a single subcutaneous (SC) dose.

ProGP ELISA

[0187] ProGP and pegylated ProGP protein concentration levels in mouse plasma were determined using a sandwich ELISA. 96-well microtiter plates were coated with 150 ml/well affinity purified goat-anti-Flt3 ligand polyclonal diluted to 1 μg/ml in 100 mM NaHCO₃, pH 8.2. Plates were incubated overnight at room temperature in a humidified chamber and blocked for one hour at 37° C. with phosphate buffered saline, containing 3 BSA and 0.05% Polyoxyethylene-Sorbitan Monolaurate (Tween 20), pH 7.4. Plates were washed four times with 150 mM NaCl containing 0.05% Tween 20 (wash buffer). Plasma PK samples were diluted in assay buffer (PBS, 0.1% BSA, 0.01% Tween 20), pH 7.4 and titered 1:2 in an assay matrix of mouse pooled plasma. The plasma concentration of the matrix and the samples were matched by percentage. Plates were incubated for 2.5 hours at 37° C. in a humidified chamber, then washed 4 times with wash buffer. Affinity purified goat-anti-human G-CSF receptor agonist polyclonal antibody conjugated to horse radish peroxidase was diluted 1:10000 (0.25-0.05 μg/mL) in assay buffer and 150 μl were added to each well. Plates were incubated for 1.5 hours at 37° C. in a humidified chamber. Wells were emptied and each well was again washed four times with wash buffer. Each well then received 150 mL of TMB peroxidase substrate solution. Plates were incubated at room temperature for about 10 minutes and read at a test wavelength of 650 nm on a microtiter plate reader (Molecular Devices Corporation). Concentrations of immuno-reactive ProGP in unknown PK samples were calculated from a standard curve of either ProGP-4 or PEG-ProGP using a four parameter curve fitting program supplied by Molecular Devices.

Pharmacokinetic Data Analysis

[0188] PK parameters reported in Table 2 were determined by noncompartmental analysis using WinNonlin (version 3.0, Pharsight, Chapel Hill, N.C.). Plasma concentration data (n=3) were averaged and a single PK analysis was performed on the mean. The apparent terminal half life (t_{1/2}) was manually selected during non-compartmental analysis by visual inspection of log-linear plot of plasma concentration vs. time. A comparison of the pharmacokinetics of ProGP-4 and PEG-ProGP are shown in FIG. 9 and Table 2. The data show that a single 100 μg dose of PEG-ProGP in mice, administered subcutaneously, has a protracted plasma residency time versus that of ProGP-4. At 48 hours the concentration of PEG-ProGP in the plasma was approximately 70 fold higher than ProGP-4. Detectable levels of PEG-ProGP were observed 96 hours after dosing while ProGP-4 was not detectable at 72 hours. PK values such as terminal half life (t_{1/2}), clearance (Cl), time to maximum concentration (Tmax) and maximum concentration (Cmax) were not significantly different for PEG-ProGP and ProGP-4. In summary, PEGylation extends the time at which the protein circulates in the blood in mice.

TABLE 2
Comparison of ProGP-4 and PEG ProGP-4
(Example 1) Pharmacokinetics in mice

| | Mice | Dose | | | AUC | | | | |
|---|---|---|---|---|---|---|---|---|---|
| | (n) | (μg/mouse) | T*max | C*max | (I) | CL/F | Vd/F | t_{1/2} | C_{48 hr} |
| ProGP | 3 | 100 | 8 | 28,000 | 529 | 0.189 | 0.944 | 3.46 | 72 |
| PEG | 3 | 100 | (8) | 19,500 | 720 | 0.139 | 0.977 | 4.87 | 4744 |
| ProGP-4 | | | 24^{a} | | | | | | |
| PEG | 3 | 100 | 8 | 40,500 | 1080 | 0.0926 | 0.657 | 4.92 | 4181 |
| ProGP-4 | | | | | | | | | |

Growth Factor Administration for Pharmacodynamics (PD)

[0189] Female C57BL/6 (8-12 wk old, Charles River, Raleigh, N.C.) mice were housed in the Pharmacia animal facility. ProGP-4 and PEG-ProGP were diluted in PBS (Life Technologies, Grand Island, N.Y.) and administered to mice at doses ranging between 100 to 500 μg/injection. Mice were injected subcutaneous (SC) as follows: ProGP-4 dosed daily either on days 0-6 or days 0-9 (0.1 mg/injection); PEG-ProGP dosed either on days 0, 3 and 6 or 0, 3, 6 and 9 (0.3 mg /injection); PEG-ProGP dosed on days 0 or days 0 and 5 (0.5 mg/injection). Vehicle controls dosed daily on days 0-9 with PBS (0.1 ml/injection).

Peripheral Blood and Spleen Processing

[0190] Peripheral blood was collected from CO₂-anesthetized mice into heparin-coated tubes by cardiac puncture. Spleens were harvested from euthanized animals immediately following blood collection. A total white blood cell (WBC) count was done on whole blood using a cell counter (Coulter ZM, Miami Lakes, Fla.). Erythrocytes were lysed using a 0.15 M hypotonic ammonium chloride solution (Stem Cell Technology, Vancouver, BC). Cells were collected by centrifugation (300×g for 10 min) and washed with cold IMDM (Life Technologies, Grand Island, N.Y.) containing 2% FBS (IMDM-FBS, Bioproducts for Science, Indianapolis, Ind.). Spleens were collected and processed in cold IMDM-FBS, homogenized into a cell suspension and filtered through a 70 um nylon mesh. Erythrocytes were lysed using hypotonic ammonium chloride solution, spleen cells were washed with cold IMDM-FBS and filtered through a 70 um mesh. Spleen cells were resuspended in 25 ml of IMDM buffer containing 2% BSA and counted to determine total number of splenocytes/spleen.

Flow Cytometry Reagents

[0191] Fluorochrome- or biotin-conjugated monoclonal antibodies were purchased from Pharmingen (San Diego, Calif.). CD16/CD32 (Fc II/III receptor antibody, Fc Block), FITC-conjugated antibodies CD11c/HL3 and PE-conjugated antibodies MHC Class II (I-A^{b/}/AF6-120.1) were used at 1-5 μg/ml. Isotype matched controls were used for the different antibody combinations.

[0192] The total white blood cell (WBC) and dendritic cell (DC) responses in the spleen were similar for PEG-ProGP dosed every third day compared to ProGP-4 dosed daily (FIG. 10) The relative DC response in the peripheral blood at day 10 was greater for PEG-ProGP dosed every third day compared to ProGP-4 dosed every day. DC mobilization kinetics (FIG. 11) are similar for ProGP-4 and PEG-ProGP-4 (Example 1) in the spleen; whereas, in the peripheral blood the DC mobilization kinetics are modified for PEG-ProGP-4 (Example 1) dosed every third day when compared to ProGP-4 dosed every day.

The application's sequence listing, which the Patent Office published only in electronic form, follows.

SEQUENCE LISTING (262 sequences)

SEQ ID NO: 1 - protein, 139 aa, Unknown
  MUTAGEN 1-139: modified mammalian flt-3 ligand
TQDCSFQHSPISSDFAVKIRELSDYLLQDYPVTVASNLQDEELCGGLWRLVLAQRWMERLKTVAGSKMQGLLERVNTEIHFVTKCAFQPPPSCLRFVQTNISRLLQETSEQLVALKPWITRQNFSRCLELQCQPDSSTL

SEQ ID NO: 2 - protein, 135 aa, Unknown
  MUTAGEN 1-135: modified mammalian flt-3 ligand
ATQDCSFQHSPISSDFAVKIRELSDYLLQDYPVTVASNLQDEELCGALWRLVLAQRWMERLKTVAGSKMQGLLERVNTEIHFVTKCAFQPPPSCLRFVQTNISRLLQETSEQLVALKPWITRQNFSRCLELQCQP

SEQ ID NO: 3 - protein, 140 aa, Unknown
  MUTAGEN 1-140: modified mammalian flt-3 ligand
ATQDCSFQHSPISSDFAVKIRELSDYLLQDYPVTVASNLQDEELCGGLWRLVLAQRWMERLKTVAGSKMQGLLERVNTEIHFVTKCAFQPPPSCLRFVQTNISRLLQETSEQLVALKPWITRQNFSRCLELQCQPDSSTL

SEQ ID NO: 4 - protein, 122 aa, Unknown
  MUTAGEN 1-122: modified mammalian flt-3 ligand
ATQDCSFQHSPISSDFAVKIRELSDYLLQDYPVTVASNLQDEELCGGLWRLVLAQRWMERLKTVAGSKMQGLLERVNTEIHFVTKCAFQETSEQLVALKPWITRQNFSRCLELQCQPDSSTL

SEQ ID NO: 5 - protein, 135 aa, Unknown
  MUTAGEN 1-135: modified mammalian flt-3 ligand
GTQDCSFQHSPISSDFAVKIRELSDYLLQDYPVTVASNLQDEELCGGLWRLVLAQRWMERLKTVAGSKMQGLLERVNTEIHFVTKCAFQPPPSCLRFVQTNISRLLQETSEQLVALKPWITRQNFSRCLELQCQP

SEQ ID NO: 6 - protein, 140 aa, Unknown
  MUTAGEN 1-140: modified mammalian flt-3 ligand
GTQDCSFQHSPISSDFAVKIRELSDYLLQDYPVTVASNLQDEELCGGLWRLVLAQRWMERLKTVAGSKMQGLLERVNTEIHFVTKCAFQPPPSCLRFVQTNISRLLQETSEQLVALKPWITRQNFSRCLELQCQPDSSTL

SEQ ID NO: 7 - protein, 135 aa, Unknown
  MUTAGEN 1-135: modified mammalian flt-3 ligand
ATQDCSFQHSPISSDFAVKIRELSDYLLQDYPVTVASNLQDEELCGGLWRLVLAQRWMERLKTVAGSKMQGLLERVNTEIHFVTKCAFQPPPSCLRFVQTNISRLLQETSEQLVALKPWITRQNFSRCLELQCQP

SEQ ID NO: 8 - protein, 140 aa, Unknown; identical to SEQ ID NO: 3
  MUTAGEN 1-140: modified mammalian flt-3 ligand

SEQ ID NO: 9 - protein, 155 aa, Unknown
  MUTAGEN 1-155: modified mammalian flt-3 ligand
ADEELCGGLWRLVLAQRWMERLKTVAGSKMQGLLERVNTEIHFVTKCAFQPPPSCLRFVQTNISRLLQETSEQLVALKPWITRQNFSRCLELQCQPDSSTLSGGNGSGGNGSGGNGTQDCSFQHSPISSDFAVKIRELSDYLLQDYPVTVASNLQ

SEQ ID NO: 10 - protein, 150 aa, Unknown
  MUTAGEN 1-150: modified mammalian flt-3 ligand
ADEELCGGLWRLVLAQRWMERLKTVAGSKMQGLLERVNTEIHFVTKCAFQPPPSCLRFVQTNISRLLQETSEQLVALKPWITRQNFSRCLELQCQPDSSTLSGGNGSGGNGTQDCSFQHSPISSDFAVKIRELSDYLLQDYPVTVASNLQ

SEQ ID NO: 11 - protein, 145 aa, Unknown
  MUTAGEN 1-145: modified mammalian flt-3 ligand
ADEELCGGLWRLVLAQRWMERLKTVAGSKMQGLLERVNTEIHFVTKCAFQPPPSCLRFVQTNISRLLQETSEQLVALKPWITRQNFSRCLELQCQPDSSTLSGGNGTQDCSFQHSPISSDFAVKIRELSDYLLQDYPVTVASNLQ

SEQ ID NO: 12 - protein, 155 aa, Unknown
  MUTAGEN 1-155: modified mammalian flt-3 ligand
ASKMQGLLERVNTEIHFVTKCAFQPPPSCLRFVQTNISRLLQETSEQLVALKPWITRQNFSRCLELQCQPDSSTLSGGNGSGGNGSGGNGTQDCSFQHSPISSDFAVKIRELSDYLLQDYPVTVASNLQDEELCGGLWRLVLAQRWMERLKTVAG

SEQ ID NO: 13 - protein, 150 aa, Unknown
  MUTAGEN 1-150: modified mammalian flt-3 ligand
ASKMQGLLERVNTEIHFVTKCAFQPPPSCLRFVQTNISRLLQETSEQLVALKPWITRQNFSRCLELQCQPDSSTLSGGNGSGGNGTQDCSFQHSPISSDFAVKIRELSDYLLQDYPVTVASNLQDEELCGGLWRLVLAQRWMERLKTVAG

SEQ ID NO: 14 - protein, 145 aa, Unknown
  MUTAGEN 1-145: modified mammalian flt-3 ligand
ASKMQGLLERVNTEIHFVTKCAFQPPPSCLRFVQTNISRLLQETSEQLVALKPWITRQNFSRCLELQCQPDSSTLSGGNGTQDCSFQHSPISSDFAVKIRELSDYLLQDYPVTVASNLQDEELCGGLWRLVLAQRWMERLKTVAG

SEQ ID NO: 15 - protein, 155 aa, Unknown
  MUTAGEN 1-155: modified mammalian flt-3 ligand
APPSCLRFVQTNISRLLQETSEQLVALKPWITRQNFSRCLELQCQPDSSTLSGGNGSGGNGSGGNGTQDCSFQHSPISSDFAVKIRELSDYLLQDYPVTVASNLQDEELCGGLWRLVLAQRWMERLKTVAGSKMQGLLERVNTEIHFVTKCAFQP

SEQ ID NO: 16 - protein, 150 aa, Unknown
  MUTAGEN 1-150: modified mammalian flt-3 ligand
APPSCLRFVQTNISRLLQETSEQLVALKPWITRQNFSRCLELQCQPDSSTLSGGNGSGGNGTQDCSFQHSPISSDFAVKIRELSDYLLQDYPVTVASNLQDEELCGGLWRLVLAQRWMERLKTVAGSKMQGLLERVNTEIHFVTKCAFQP

SEQ ID NO: 17 - protein, 145 aa, Unknown
  MUTAGEN 1-145: modified mammalian flt-3 ligand
APPSCLRFVQTNISRLLQETSEQLVALKPWITRQNFSRCLELQCQPDSSTLSGGNGTQDCSFQHSPISSDFAVKIRELSDYLLQDYPVTVASNLQDEELCGGLWRLVLAQRWMERLKTVAGSKMQGLLERVNTEIHFVTKCAFQP

SEQ ID NO: 18 - protein, 155 aa, Unknown
  MUTAGEN 1-155: modified mammalian flt-3 ligand
ADEELCGGLWRLVLAQRWMERLKTVAGSKMQGLLERVNTEIHFVTKCAFQPPPSCLRFVQTNISRLLQETSEQLVALKPWITRQNFSRCLELQCQPDSSTLSGGSGSGGSGSGGSGTQDCSFQHSPISSDFAVKIRELSDYLLQDYPVTVASNLQ

SEQ ID NO: 19 - protein, 150 aa, Unknown
  MUTAGEN 1-150: modified mammalian flt-3 ligand
ADEELCGGLWRLVLAQRWMERLKTVAGSKMQGLLERVNTEIHFVTKCAFQPPPSCLRFVQTNISRLLQETSEQLVALKPWITRQNFSRCLELQCQPDSSTLSGGSGSGGSGTQDCSFQHSPISSDFAVKIRELSDYLLQDYPVTVASNLQ

SEQ ID NO: 20 - protein, 145 aa, Unknown
  MUTAGEN 1-145: modified mammalian flt-3 ligand
MATQDCSFQHSPISSDFAVKIRELSDYLLQDYPVTVASNLQDEELCGGLWRLVLAQRWMERLKTVAGSKMQGLLERVNTEIHFVTKCAFQPPPSCLRFVQTNISRLLQETSEQLVALKPWITRQNFSRCLELQCQPDSSTLGGGS

SEQ ID NO: 21 - protein, 143 aa, Unknown
  MUTAGEN 1-143: modified mammalian flt-3 ligand
GSGGTQDCSFQHSPISSDFAVKIRELSDYLLQDYPVTVASNLQDEELCGGLWRLVLAQRWMERLKTVAGSKMQGLLERVNTEIHFVTKCAFQPPPSCLRFVQTNISRLLQETSEQLVALKPWITRQNFSRCLELQCQPDSSTL

SEQ ID NO: 22 - protein, 149 aa, Unknown
  MUTAGEN 1-149: modified mammalian flt-3 ligand
MATQDCSFQHSPISSDFAVKIRELSDYLLQDYPVTVASNLQDEELCGGLWRLVLAQRWMERLKTVAGSKMQGLLERVNTEIHFVTKCAFQPPPSCLRFVQTNISRLLQETSEQLVALKPWITRQNFSRCLELQCQPDSSTLGGGSGGGS

SEQ ID NO: 23 - protein, 144 aa, Unknown
  MUTAGEN 1-144: modified mammalian flt-3 ligand
GSGGGTQDCSFQHSPISSDFAVKIRELSDYLLQDYPVTVASNLQDEELCGGLWRLVLAQRWMERLKTVAGSKMQGLLERVNTEIHFVTKCAFQPPPSCLRFVQTNISRLLQETSEQLVALKPWITRQNFSRCLELQCQPDSSTL

SEQ ID NO: 24 - protein, 153 aa, Unknown
  MUTAGEN 1-153: modified mammalian flt-3 ligand
MATQDCSFQHSPISSDFAVKIRELSDYLLQDYPVTVASNLQDEELCGGLWRLVLAQRWMERLKTVAGSKMQGLLERVNTEIHFVTKCAFQPPPSCLRFVQTNISRLLQETSEQLVALKPWITRQNFSRCLELQCQPDSSTLGGGSGGGSGGGS

SEQ ID NO: 25 - protein, 150 aa, Unknown
  MUTAGEN 1-150: modified mammalian flt-3 ligand
GSGGGSGGGSGTQDCSFQHSPISSDFAVKIRELSDYLLQDYPVTVASNLQDEELCGGLWRLVLAQRWMERLKTVAGSKMQGLLERVNTEIHFVTKCAFQPPPSCLRFVQTNISRLLQETSEQLVALKPWITRQNFSRCLELQCQPDSSTL

SEQ ID NO: 26 - protein, 146 aa, Unknown
  MUTAGEN 1-146: modified mammalian flt-3 ligand
ADEELCGGLWRLVLAQRWMERLKTVAGSKMQGLLERVNTEIHFVTKCAFQPPPSCLRFVQTNISRLLQETSEQLVALKPWITRQNFSRCLELQCQPDSSTLGGGSGGTQDCSFQHSPISSDFAVKIRELSDYLLQDYPVTVASNLQ

SEQ ID NO: 27 - protein, 147 aa, Unknown
  MUTAGEN 1-147: modified mammalian flt-3 ligand
ADEELCGGLWRLVLAQRWMERLKTVAGSKMQGLLERVNTEIHFVTKCAFQPPPSCLRFVQTNISRLLQETSEQLVALKPWITRQNFSRCLELQCQPDSSTLGGGSGGGTQDCSFQHSPISSDFAVKIRELSDYLLQDYPVTVASNLQ

SEQ ID NO: 28 - protein, 150 aa, Unknown
  MUTAGEN 1-150: modified mammalian flt-3 ligand
ADEELCGGLWRLVLAQRWMERLKTVAGSKMQGLLERVNTEIHFVTKCAFQPPPSCLRFVQTNISRLLQETSEQLVALKPWITRQNFSRCLELQCQPDSSTLGGGSGGGSGGTQDCSFQHSPISSDFAVKIRELSDYLLQDYPVTVASNLQ

SEQ ID NO: 29 - protein, 153 aa, Unknown
  MUTAGEN 1-153: modified mammalian flt-3 ligand
ADEELCGGLWRLVLAQRWMERLKTVAGSKMQGLLERVNTEIHFVTKCAFQPPPSCLRFVQTNISRLLQETSEQLVALKPWITRQNFSRCLELQCQPDSSTLGGGSGGGSGGGSGTQDCSFQHSPISSDFAVKIRELSDYLLQDYPVTVASNLQ

SEQ ID NO: 30 - protein, 155 aa, Unknown
  MUTAGEN 1-155: modified mammalian flt-3 ligand
ADEELCGGLWRLVLAQRWMERLKTVAGSKMQGLLERVNTEIHFVTKCAFQPPPSCLRFVQTNISRLLQETSEQLVALKPWITRQNFSRCLELQCQPDSSTLGGGSGGGSGGGSGGGTQDCSFQHSPISSDFAVKIRELSDYLLQDYPVTVASNLQ

SEQ ID NO: 31 - protein, 161 aa, Unknown
  MUTAGEN 1-161: modified mammalian flt-3 ligand
ADEELCGGLWRLVLAQRWMERLKTVAGSKMQGLLERVNTEIHFVTKCAFQPPPSCLRFVQTNISRLLQETSEQLVALKPWITRQNFSRCLELQCQPDSSTLGGGSGGGSGGGSGGGSGGGSGTQDCSFQHSPISSDFAVKIRELSDYLLQDYPVTVASNLQ

SEQ ID NO: 32 - protein, 281 aa, Unknown
  MUTAGEN 1-281: progenipoeitin protein
ANCSIMIDEIIHHLKRPPAPLLDPNNLNDEDVSILMDRNLRLPNLESFVRAVKNLENASGIEAILRNLQPCLPSATAAPSRHPIIIKAGDWQEFREKLTFYLVTLEQAQEQQYVEGGGGSPGEPSGPISTINPSPPSKESHKSPNMATQDCSFQHSPISSDFAVKIRELSDYLLQDYPVTVASNLQDEELCGALWRLVLAQRWMERLKTVAGSKMQGLLERVNTEIHFVTKCAFQPPPSCLRFVQTNISRLLQETSEQLVALKPWITRQNFSRCLELQCQP

SEQ ID NO: 33 - protein, 286 aa, Unknown
  MUTAGEN 1-286: progenipoeitin protein
ANCSIMIDEIIHHLKRPPAPLLDPNNLNDEDVSILMDRNLRLPNLESFVRAVKNLENASGIEAILRNLQPCLPSATAAPSRHPIIIKAGDWQEFREKLTFYLVTLEQAQEQQYVEGGGGSPGEPSGPISTINPSPPSKESHKSPNMATQDCSFQHSPISSDFAVKIRELSDYLLQDYPVTVASNLQDEELCGALWRLVLAQRWMERLKTVAGSKMQGLLERVNTEIHFVTKCAFQPPPSCLRFVQTNISRLLQETSEQLVALKPWITRQNFSRCLELQCQPDSSTL

SEQ ID NO: 34 - protein, 296 aa, Unknown
  MUTAGEN 1-296: progenipoeitin protein
ANCSIMIDEIIHHLKRPPAPLLDPNNLNDEDVSILMDRNLRLPNLESFVRAVKNLENASGIEAILRNLQPCLPSATAAPSRHPIIIKAGDWQEFREKLTFYLVTLEQAQEQQYVEGGGGSPGEPSGPISTINPSPPSKESHKSPNMADEELCGGLWRLVLAQRWMERLKTVAGSKMQGLLERVNTEIHFVTKCAFQPPPSCLRFVQTNISRLLQETSEQLVALKPWITRQNFSRCLELQCQPDSSTLSGGNGSGGNGTQDCSFQHSPISSDFAVKIRELSDYLLQDYPVTVASNLQ

SEQ ID NO: 35 - protein, 296 aa, Unknown; identical to SEQ ID NO: 34
  MUTAGEN 1-296: progenipoeitin protein

SEQ ID NO: 36 - protein, 291 aa, Unknown
  MUTAGEN 1-291: progenipoeitin protein
ANCSIMIDEIIHHLKRPPAPLLDPNNLNDEDVSILMDRNLRLPNLESFVRAVKNLENASGIEAILRNLQPCLPSATAAPSRHPIIIKAGDWQEFREKLTFYLVTLEQAQEQQYVEGGGGSPGEPSGPISTINPSPPSKESHKSPNMASKMQGLLERVNTEIHFVTKCAFQPPPSCLRFVQTNISRLLQETSEQLVALKPWITRQNFSRCLELQCQPDSSTLSGGNGTQDCSFQHSPISSDFAVKIRELSDYLLQDYPVTVASNLQDEELCGGLWRLVLAQRWMERLKTVAG

SEQ ID NO: 37 - protein, 296 aa, Unknown
  MUTAGEN 1-296: progenipoeitin protein
ANCSIMIDEIIHHLKRPPAPLLDPNNLNDEDVSILMDRNLRLPNLESFVRAVKNLENASGIEAILRNLQPCLPSATAAPSRHPIIIKAGDWQEFREKLTFYLVTLEQAQEQQYVEGGGGSPGEPSGPISTINPSPPSKESHKSPNMASKMQGLLERVNTEIHFVTKCAFQPPPSCLRFVQTNISRLLQETSEQLVALKPWITRQNFSRCLELQCQPDSSTLSGGNGSGGNGTQDCSFQHSPISSDFAVKIRELSDYLLQDYPVTVASNLQDEELCGGLWRLVLAQRWMERLKTVAG

SEQ ID NO: 38 - protein, 301 aa, Unknown
  MUTAGEN 1-301: progenipoeitin protein
ANCSIMIDEIIHHLKRPPAPLLDPNNLNDEDVSILMDRNLRLPNLESFVRAVKNLENASGIEAILRNLQPCLPSATAAPSRHPIIIKAGDWQEFREKLTFYLVTLEQAQEQQYVEGGGGSPGEPSGPISTINPSPPSKESHKSPNMADEELCGGLWRLVLAQRWMERLKTVAGSKMQGLLERVNTEIHFVTKCAFQPPPSCLRFVQTNISRLLQETSEQLVALKPWITRQNFSRCLELQCQPDSSTLSGGNGSGGNGSGGNGTQDCSFQHSPISSDFAVKIRELSDYLLQDYPVTVASNLQ

SEQ ID NO: 39 - protein, 291 aa, Unknown
  MUTAGEN 1-291: progenipoeitin protein
ANCSIMIDEIIHHLKRPPAPLLDPNNLNDEDVSILMDRNLRLPNLESFVRAVKNLENASGIEAILRNLQPCLPSATAAPSRHPIIIKAGDWQEFREKLTFYLVTLEQAQEQQYVEGGGGSPGEPSGPISTINPSPPSKESHKSPNMAPPSCLRFVQTNISRLLQETSEQLVALKPWITRQNFSRCLELQCQPDSSTLSGGNGTQDCSFQHSPISSDFAVKIRELSDYLLQDYPVTVASNLQDEELCGGLWRLVLAQRWMERLKTVAGSKMQGLLERVNTEIHFVTKCAFQP

SEQ ID NO: 40 - protein, 296 aa, Unknown
  MUTAGEN 1-296: progenipoeitin protein
ANCSIMIDEIIHHLKRPPAPLLDPNNLNDEDVSILMDRNLRLPNLESFVRAVKNLENASGIEAILRNLQPCLPSATAAPSRHPIIIKAGDWQEFREKLTFYLVTLEQAQEQQYVEGGGGSPGEPSGPISTINPSPPSKESHKSPNMAPPSCLRFVQTNISRLLQETSEQLVALKPWITRQNFSRCLELQCQPDSSTLSGGNGSGGNGTQDCSFQHSPISSDFAVKIRELSDYLLQDYPVTVASNLQDEELCGGLWRLVLAQRWMERLKTVAGSKMQGLLERVNTEIHFVTKCAFQP

SEQ ID NO: 41 - protein, 301 aa, Unknown
  MUTAGEN 1-301: progenipoeitin protein
ANCSIMIDEIIHHLKRPPAPLLDPNNLNDEDVSILMDRNLRLPNLESFVRAVKNLENASGIEAILRNLQPCLPSATAAPSRHPIIIKAGDWQEFREKLTFYLVTLEQAQEQQYVEGGGGSPGEPSGPISTINPSPPSKESHKSPNMAPPSCLRFVQTNISRLLQETSEQLVALKPWITRQNFSRCLELQCQPDSSTLSGGNGSGGNGSGGNGTQDCSFQHSPISSDFAVKIRELSDYLLQDYPVTVASNLQDEELCGGLWRLVLAQRWMERLKTVAGSKMQGLLERVNTEIHFVTKCAFQP

SEQ ID NO: 42 - protein, 281 aa, Unknown
  MUTAGEN 1-281: progenipoeitin protein
ANCSIMIDEIIHHLKRPPNPLLDPNNLNSEDMDILMERNLRTPNLLAFVRAVKHLENASGIEAILRNLQPCLPSATAAPSRHPIIIKAGDWQEFREKLTFYLVTLEQAQEQQYVEGGGGSPGEPSGPISTINPSPPSKESHKSPNMATQDCSFQHSPISSDFAVKIRELSDYLLQDYPVTVASNLQDEELCGGLWRLVLAQRWMERLKTVAGSKMQGLLERVNTEIHFVTKCAFQPPPSCLRFVQTNISRLLQETSEQLVALKPWITRQNFSRCLELQCQP

SEQ ID NO: 43 - protein, 286 aa, Unknown
  MUTAGEN 1-286: progenipoeitin protein
ANCSIMIDEIIHHLKRPPNPLLDPNNLNSEDMDILMERNLRTPNLLAFVRAVKHLENASGIEAILRNLQPCLPSATAAPSRHPIIIKAGDWQEFREKLTFYLVTLEQAQEQQYVEGGGGSPGEPSGPISTINPSPPSKESHKSPNMATQDCSFQHSPISSDFAVKIRELSDYLLQDYPVTVASNLQDEELCGGLWRLVLAQRWMERLKTVAGSKMQGLLERVNTEIHFVTKCAFQPPPSCLRFVQTNISRLLQETSEQLVALKPWITRQNFSRCLELQCQPDSSTL

SEQ ID NO: 44 - protein, 296 aa, Unknown
  MUTAGEN 1-296: progenipoeitin protein
ANCSIMIDEIIHHLKRPPNPLLDPNNLNSEDMDILMERNLRTPNLLAFVRAVKHLENASGIEAILRNLQPCLPSATAAPSRHPIIIKAGDWQEFREKLTFYLVTLEQAQEQQYVEGGGGSPGEPSGPISTINPSPPSKESHKSPNMADEELCGGLWRLVLAQRWMERLKTVAGSKMQGLLERVNTEIHFVTKCAFQPPPSCLRFVQTNISRLLQETSEQLVALKPWITRQNFSRCLELQCQPDSSTLSGGNGSGGNGTQDCSFQHSPISSDFAVKIRELSDYLLQDYPVTVASNLQ

SEQ ID NO: 45 - protein, 301 aa, Unknown
  MUTAGEN 1-301: progenipoeitin protein
ANCSIMIDEIIHHLKRPPNPLLDPNNLNSEDMDILMERNLRTPNLLAFVRAVKHLENASGIEAILRNLQPCLPSATAAPSRHPIIIKAGDWQEFREKLTFYLVTLEQAQEQQYVEGGGGSPGEPSGPISTINPSPPSKESHKSPNMADEELCGGLWRLVLAQRWMERLKTVAGSKMQGLLERVNTEIHFVTKCAFQPPPSCLRFVQTNISRLLQETSEQLVALKPWITRQNFSRCLELQCQPDSSTLSGGNGSGGNGSGGNGTQDCSFQHSPISSDFAVKIRELSDYLLQDYPVTVASNLQ

SEQ ID NO: 46 - protein, 291 aa, Unknown
  MUTAGEN 1-291: progenipoeitin protein
ANCSIMIDEIIHHLKRPPNPLLDPNNLNSEDMDILMERNLRTPNLLAFVRAVKHLENASGIEAILRNLQPCLPSATAAPSRHPIIIKAGDWQEFREKLTFYLVTLEQAQEQQYVEGGGGSPGEPSGPISTINPSPPSKESHKSPNMASKMQGLLERVNTEIHFVTKCAFQPPPSCLRFVQTNISRLLQETSEQLVALKPWITRQNFSRCLELQCQPDSSTLSGGNGTQDCSFQHSPISSDFAVKIRELSDYLLQDYPVTVASNLQDEELCGGLWRLVLAQRWMERLKTVAG

SEQ ID NO: 47 - protein, 296 aa, Unknown
  MUTAGEN 1-296: progenipoeitin protein
ANCSIMIDEIIHHLKRPPNPLLDPNNLNSEDMDILMERNLRTPNLLAFVRAVKHLENASGIEAILRNLQPCLPSATAAPSRHPIIIKAGDWQEFREKLTFYLVTLEQAQEQQYVEGGGGSPGEPSGPISTINPSPPSKESHKSPNMASKMQGLLERVNTEIHFVTKCAFQPPPSCLRFVQTNISRLLQETSEQLVALKPWITRQNFSRCLELQCQPDSSTLSGGNGSGGNGTQDCSFQHSPISSDFAVKIRELSDYLLQDYPVTVASNLQDEELCGGLWRLVLAQRWMERLKTVAG

SEQ ID NO: 48 - protein, 301 aa, Unknown
  MUTAGEN 1-301: progenipoeitin protein
ANCSIMIDEIIHHLKRPPNPLLDPNNLNSEDMDILMERNLRTPNLLAFVRAVKHLENASGIEAILRNLQPCLPSATAAPSRHPIIIKAGDWQEFREKLTFYLVTLEQAQEQQYVEGGGGSPGEPSGPISTINPSPPSKESHKSPNMASKMQGLLERVNTEIHFVTKCAFQPPPSCLRFVQTNISRLLQETSEQLVALKPWITRQNFSRCLELQCQPDSSTLSGGNGSGGNGSGGNGTQDCSFQHSPISSDFAVKIRELSDYLLQDYPVTVASNLQDEELCGGLWRLVLAQRWMERLKTVAG

SEQ ID NO: 49 - protein, 291 aa, Unknown
  MUTAGEN 1-291: progenipoeitin protein
ANCSIMIDEIIHHLKRPPNPLLDPNNLNSEDMDILMERNLRTPNLLAFVRAVKHLENASGIEAILRNLQPCLPSATAAPSRHPIIIKAGDWQEFREKLTFYLVTLEQAQEQQYVEGGGGSPGEPSGPISTINPSPPSKESHKSPNMAPPSCLRFVQTNISRLLQETSEQLVALKPWITRQNFSRCLELQCQPDSSTLSGGNGTQDCSFQHSPISSDFAVKIRELSDYLLQDYPVTVASNLQDEELCGGLWRLVLAQRWMERLKTVAGSKMQGLLERVNTEIHFVTKCAFQP

SEQ ID NO: 50 - protein, 296 aa, Unknown
  MUTAGEN 1-296: progenipoeitin protein
ANCSIMIDEIIHHLKRPPNPLLDPNNLNSEDMDILMERNLRTPNLLAFVRAVKHLENASGIEAILRNLQPCLPSATAAPSRHPIIIKAGDWQEFREKLTFYLVTLEQAQEQQYVEGGGGSPGEPSGPISTINPSPPSKESHKSPNMAPPSCLRFVQTNISRLLQETSEQLVALKPWITRQNFSRCLELQCQPDSSTLSGGNGSGGNGTQDCSFQHSPISSDFAVKIRELSDYLLQDYPVTVASNLQDEELCGGLWRLVLAQRWMERLKTVAGSKMQGLLERVNTEIHFVTKCAFQP

SEQ ID NO: 51 - protein, 301 aa, Unknown
  MUTAGEN 1-301: progenipoeitin protein
ANCSIMIDEIIHHLKRPPNPLLDPNNLNSEDMDILMERNLRTPNLLAFVRAVKHLENASGIEAILRNLQPCLPSATAAPSRHPIIIKAGDWQEFREKLTFYLVTLEQAQEQQYVEGGGGSPGEPSGPISTINPSPPSKESHKSPNMAPPSCLRFVQTNISRLLQETSEQLVALKPWITRQNFSRCLELQCQPDSSTLSGGNGSGGNGSGGNGTQDCSFQHSPISSDFAVKIRELSDYLLQDYPVTVASNLQDEELCGGLWRLVLAQRWMERLKTVAGSKMQGLLERVNTEIHFVTKCAFQP

SEQ ID NO: 52 - protein, 296 aa, Unknown
  MUTAGEN 1-296: progenipoeitin protein
ANCSIMIDEIIHHLKRPPNPLLDPNNLNSEDMDILMERNLRTPNLLAFVRAVKHLENASGIEAILRNLQPCLPSATAAPSRHPIIIKAGDWQEFREKLTFYLVTLEQAQEQQYVEGGGGSPGEPSGPISTINPSPPSKESHKSPNMADEELCGGLWRLVLAQRWMERLKTVAGSKMQGLLERVNTEIHFVTKCAFQPPPSCLRFVQTNISRLLQETSEQLVALKPWITRQNFSRCLELQCQPDSSTLSGGSGSGGSGTQDCSFQHSPISSDFAVKIRELSDYLLQDYPVTVASNLQ

SEQ ID NO: 53 - protein, 301 aa, Unknown
  MUTAGEN 1-301: progenipoeitin protein
ANCSIMIDEIIHHLKRPPNPLLDPNNLNSEDMDILMERNLRTPNLLAFVRAVKHLENASGIEAILRNLQPCLPSATAAPSRHPIIIKAGDWQEFREKLTFYLVTLEQAQEQQYVEGGGGSPGEPSGPISTINPSPPSKESHKSPNMADEELCGGLWRLVLAQRWMERLKTVAGSKMQGLLERVNTEIHFVTKCAFQPPPSCLRFVQTNISRLLQETSEQLVALKPWITRQNFSRCLELQCQPDSSTLSGGSGSGGSGSGGSGTQDCSFQHSPISSDFAVKIRELSDYLLQDYPVTVASNLQ

SEQ ID NO: 54 - protein, 281 aa, Unknown
  MUTAGEN 1-281: progenipoeitin protein
ATQDCSFQHSPISSDFAVKIRELSDYLLQDYPVTVASNLQDEELCGGLWRLVLAQRWMERLKTVAGSKMQGLLERVNTEIHFVTKCAFQPPPSCLRFVQTNISRLLQETSEQLVALKPWITRQNFSRCLELQCQPYVEGGGGSPGEPSGPISTINPSPPSKESHKSPNMANCSIMIDEIIHHLKRPPNPLLDPNNLNSEDMDILMERNLRTPNLLAFVRAVKHLENASGIEAILRNLQPCLPSATAAPSRHPIIIKAGDWQEFREKLTFYLVTLEQAQEQQ

SEQ ID NO: 55 - protein, 286 aa, Unknown
  MUTAGEN 1-286: progenipoeitin protein
ATQDCSFQHSPISSDFAVKIRELSDYLLQDYPVTVASNLQDEELCGGLWRLVLAQRWMERLKTVAGSKMQGLLERVNTEIHFVTKCAFQPPPSCLRFVQTNISRLLQETSEQLVALKPWITRQNFSRCLELQCQPDSSTLYVEGGGGSPGEPSGPISTINPSPPSKESHKSPNMANCSIMIDEIIHHLKRPPNPLLDPNNLNSEDMDILMERNLRTPNLLAFVRAVKHLENASGIEAILRNLQPCLPSATAAPSRHPIIIKAGDWQEFREKLTFYLVTLEQAQEQQ

SEQ ID NO: 56 - protein, 268 aa, Unknown
  MUTAGEN 1-268: progenipoeitin protein
ANCSIMIDEIIHHLKRPPNPLLDPNNLNSEDMDILMERNLRTPNLLAFVRAVKHLENASGIEAILRNLQPCLPSATAAPSPHPIIIKAGDWQEFREKLTFYLVTLEQAQEQQYVEGGGGSPGEPSGPISTINPSPPSKESHKSPNMATQDCSFQHSPISSDFAVKIRELSDYLLQDYPVTVASNLQDEELCGGLWRLVLAQRWMERLKTVAGSKMQGLLERVNTEIHFVTKCAFQETSEQLVALKPWITRQNFSRCLELQCQPDSSTL

SEQ ID NO: 57 - protein, 292 aa, Unknown
  MUTAGEN 1-292: progenipoeitin protein
ANCSIMIDEIIHHLKRPPNPLLDPNNLNSEDMDILMERNLRTPNLLAFVRAVKHLENASGIEAILRNLQPCLPSATAAPSRHPIIIKAGDWQEFREKLTFYLVTLEQAQEQQYVEGGGGSPGEPSGPISTINPSPPSKESHKSPNMADEELCGGLWRLVLAQRWMERLKTVAGSKMQGLLERVNTEIHFVTKCAFQPPPSCLRFVQTNISRLLQETSEQLVALKPWITRQNFSRCLELQCQPDSSTLGGGSGGTQDCSFQHSPISSDFAVKIRELSDYLLQDYPVTVASNLQ

SEQ ID NO: 58 - protein, 293 aa, Unknown
  MUTAGEN 1-293: progenipoeitin protein
ANCSIMIDEIIHHLKRPPNPLLDPNNLNSEDMDILMERNLRTPNLLAFVRAVKHLENASGIEAILRNLQPCLPSATAAPSRHPIIIKAGDWQEFREKLTFYLVTLEQAQEQQYVEGGGGSPGEPSGPISTINPSPPSKESHKSPNMADEELCGGLWRLVLAQRWMERLKTVAGSKMQGLLERVNTEIHFVTKCAFQPPPSCLRFVQTNISRLLQETSEQLVALKPWITRQNFSRCLELQCQPDSSTLGGGSGGGTQDCSFQHSPISSDFAVKIRELSDYLLQDYPVTVASNLQ

SEQ ID NO: 59 - protein, 296 aa, Unknown
  MUTAGEN 1-296: progenipoeitin protein
ANCSIMIDEIIHHLKRPPNPLLDPNNLNSEDMDILMERNLRTPNLLAFVRAVKHLENASGIEAILRNLQPCLPSATAAPSRHPIIIKAGDWQEFREKLTFYLVTLEQAQEQQYVEGGGGSPGEPSGPISTINPSPPSKESHKSPNMADEELCGGLWRLVLAQRWMERLKTVAGSKMQGLLERVNTEIHFVTKCAFQPPPSCLRFVQTNISRLLQETSEQLVALKPWITRQNFSRCLELQCQPDSSTLGGGSGGGSGGTQDCSFQHSPISSDFAVKIRELSDYLLQDYPVTVASNLQ

SEQ ID NO: 60 - protein, 299 aa, Unknown
  MUTAGEN 1-299: progenipoeitin protein
ANCSIMIDEIIHHLKRPPNPLLDPNNLNSEDMDILMERNLRTPNLLAFVRAVKHLENASGIEAILRNLQPCLPSATAAPSRHPIIIKAGDWQEFREKLTFYLVTLEQAQEQQYVEGGGGSPGEPSGPISTINPSPPSKESHKSPNMADEELCGGLWRLVLAQRWMERLKTVAGSKMQGLLERVNTEIHFVTKCAFQPPPSCLRFVQTNISRLLQETSEQLVALKPWITRQNFSRCLELQCQPDSSTLGGGSGGGSGGGSGTQDCSFQHSPISSDFAVKIRELSDYLLQDYPVTVASNLQ

SEQ ID NO: 61 - protein, 301 aa, Unknown
  MUTAGEN 1-301: progenipoeitin protein
ANCSIMIDEIIHHLKRPPNPLLDPNNLNSEDMDILMERNLRTPNLLAFVRAVKHLENASGIEAILRNLQPCLPSATAAPSRHPIIIKAGDWQEFREKLTFYLVTLEQAQEQQYVEGGGGSPGEPSGPISTINPSPPSKESHKSPNMADEELCGGLWRLVLAQRWMERLKTVAGSKMQGLLERVNTEIHFVTKCAFQPPPSCLRFVQTNISRLLQETSEQLVALKPWITRQNFSRCLELQCQPDSSTLGGGSGGGSGGGSGGGTQDCSFQHSPISSDFAVKIRELSDYLLQDYPVTVASNLQ

SEQ ID NO: 62 - protein, 307 aa, Unknown
  MUTAGEN 1-307: progenipoeitin protein
ANCSIMIDEIIHHLKRPPNPLLDPNNLNSEDMDILMERNLRTPNLLAFVRAVKHLENASGIEAILRNLQPCLPSATAAPSRHPIIIKAGDWQEFREKLTFYLVTLEQAQEQQYVEGGGGSPGEPSGPISTINPSPPSKESHKSPNMADEELCGGLWRLVLAQRWMERLKTVAGSKMQGLLERVNTEIHFVTKCAFQPPPSCLRFVQTNISRLLQETSEQLVALKPWITRQNFSRCLELQCQPDSSTLGGGSGGGSGGGSGGGSGGGSGTQDCSFQHSPISSDFAVKIRELSDYLLQDYPVTVASNLQ

SEQ ID NO: 63 - protein, 292 aa, Unknown
  MUTAGEN 1-292: progenipoeitin protein
ANCSIMIDEIIHHLKRPPNPLLDPNNLNSEDMDILMERNLRTPNLLAFVRAVKHLENASGIEAILRNLQPCLPSATAAPSRHPIIIKAGDWQEFREKLTFYLVTLEQAQEQQYVEGGGGSPGEPSGPISTINPSPPSKESHKSPNMASKMQGLLERVNTEIHFVTKCAFQPPPSCLRFVQTNISRLLQETSEQLVALKPWITRQNFSRCLELQCQPDSSTLGGGSGGTQDCSFQHSPISSDFAVKIRELSDYLLQDYPVTVASNLQDEELCGGLWRLVLAQRWMERLKTVAG

SEQ ID NO: 64 - protein, 293 aa, Unknown
  MUTAGEN 1-293: progenipoeitin protein
ANCSIMIDEIIHHLKRPPNPLLDPNNLNSEDMDILMERNLRTPNLLAFVRAVKHLENASGIEAILRNLQPCLPSATAAPSRHPIIIKAGDWQEFREKLTFYLVTLEQAQEQQYVEGGGGSPGEPSGPISTINPSPPSKESHKSPNMASKMQGLLERVNTEIHFVTKCAFQPPPSCLRFVQTNISRLLQETSEQLVALKPWITRQNFSRCLELQCQPDSSTLGGGSGGGTQDCSFQHSPISSDFAVKIRELSDYLLQDYPVTVASNLQDEELCGGLWRLVLAQRWMERLKTVAG

SEQ ID NO: 65 - protein, 296 aa, Unknown
  MUTAGEN 1-296: progenipoeitin protein
ANCSIMIDEIIHHLKRPPNPLLDPNNLNSEDMDILMERNLRTPNLLAFVRAVKHLENASGIEAILRNLQPCLPSATAAPSRHPIIIKAGDWQEFREKLTFYLVTLEQAQEQQYVEGGGGSPGEPSGPISTINPSPPSKESHKSPNMASKMQGLLERVNTEIHFVTKCAFQPPPSCLRFVQTNISRLLQETSEQLVALKPWITRQNFSRCLELQCQPDSSTLGGGSGGGSGGTQDCSFQHSPISSDFAVKIRELSDYLLQDYPVTVASNLQDEELCGGLWRLVLAQRWMERLKTVAG

SEQ ID NO: 66 - protein, 299 aa, Unknown
  MUTAGEN 1-299: progenipoeitin protein
ANCSIMIDEIIHHLKRPPNPLLDPNNLNSEDMDILMERNLRTPNLLAFVRAVKHLENASGIEAILRNLQPCLPSATAAPSRHPIIIKAGDWQEFREKLTFYLVTLEQAQEQQYVEGGGGSPGEPSGPISTINPSPPSKESHKSPNMASKMQGLLERVNTEIHFVTKCAFQPPPSCLRFVQTNISRLLQETSEQLVALKPWITRQNFSRCLELQCQPDSSTLGGGSGGGSGGGSGTQDCSFQHSPISSDFAVKIRELSDYLLQDYPVTVASNLQDEELCGGLWRLVLAQRWMERLKTVAG

SEQ ID NO: 67 - protein, 301 aa, Unknown
  MUTAGEN 1-301: progenipoeitin protein
ANCSIMIDEIIHHLKRPPNPLLDPNNLNSEDMDILMERNLRTPNLLAFVRAVKHLENASGIEAILRNLQPCLPSATAAPSRHPIIIKAGDWQEFREKLTFYLVTLEQAQEQQYVEGGGGSPGEPSGPISTINPSPPSKESHKSPNMASKMQGLLERVNTEIHFVTKCAFQPPPSCLRFVQTNISRLLQETSEQLVALKPWITRQNFSRCLELQCQPDSSTLGGGSGGGSGGGSGGGTQDCSFQHSPISSDFAVKIRELSDYLLQDYPVTVASNLQDEELCGGLWRLVLAQRWMERLKTVAG

SEQ ID NO: 68 - protein, 307 aa, Unknown
  MUTAGEN 1-307: progenipoeitin protein
ANCSIMIDEIIHHLKRPPNPLLDPNNLNSEDMDILMERNLRTPNLLAFVRAVKHLENASGIEAILRNLQPCLPSATAAPSRHPIIIKAGDWQEFREKLTFYLVTLEQAQEQQYVEGGGGSPGEPSGPISTINPSPPSKESHKSPNMASKMQGLLERVNTEIHFVTKCAFQPPPSCLRFVQTNISRLLQETSEQLVALKPWITRQNFSRCLELQCQPDSSTLGGGSGGGSGGGSGGGSGGGSGTQDCSFQHSPISSDFAVKIRELSDYLLQDYPVTVASNLQDEELCGGLWRLVLAQRWMERLKTVAG

SEQ ID NO: 69 - protein, 292 aa, Unknown
  MUTAGEN 1-292: progenipoeitin protein
ANCSIMIDEIIHHLKRPPNPLLDPNNLNSEDMDILMERNLRTPNLLAFVRAVKHLENASGIEAILRNLQPCLPSATAAPSRHPIIIKAGDWQEFREKLTFYLVTLEQAQEQQYVEGGGGSPGEPSGPISTINPSPPSKESHKSPNMAPPSCLRFVQTNISRLLQETSEQLVALKPWITRQNFSRCLELQCQPDSSTLGGGSGGTQDCSFQHSPISSDFAVKIRELSDYLLQDYPVTVASNLQDEELCGGLWRLVLAQRWMERLKTVAGSKMQGLLERVNTEIHFVTKCAFQP

SEQ ID NO: 70 - protein, 293 aa, Unknown
  MUTAGEN 1-293: progenipoeitin protein
ANCSIMIDEIIHHLKRPPNPLLDPNNLNSEDMDILMERNLRTPNLLAFVRAVKHLENASGIEAILRNLQPCLPSATAAPSRHPIIIKAGDWQEFREKLTFYLVTLEQAQEQQYVEGGGGSPGEPSGPISTINPSPPSKESHKSPNMAPPSCLRFVQTNISRLLQETSEQLVALKPWITRQNFSRCLELQCQPDSSTLGGGSGGGTQDCSFQHSPISSDFAVKIRELSDYLLQDYPVTVASNLQDEELCGGLWRLVLAQRWMERLKTVAGSKMQGLLERVNTEIHFVTKCAFQP

SEQ ID NO: 71 - protein, 296 aa, Unknown
  MUTAGEN 1-296: progenipoeitin protein
ANCSIMIDEIIHHLKRPPNPLLDPNNLNSEDMDILMERNLRTPNLLAFVRAVKHLENASGIEAILRNLQPCLPSATAAPSRHPIIIKAGDWQEFREKLTFYLVTLEQAQEQQYVEGGGGSPGEPSGPISTINPSPPSKESHKSPNMAPPSCLRFVQTNISRLLQETSEQLVALKPWITRQNFSRCLELQCQPDSSTLGGGSGGGSGGTQDCSFQHSPISSDFAVKIRELSDYLLQDYPVTVASNLQDEELCGGLWRLVLAQRWMERLKTVAGSKMQGLLERVNTEIHFVTKCAFQP

SEQ ID NO: 72 - protein, 299 aa, Unknown
  MUTAGEN 1-299: progenipoeitin protein
ANCSIMIDEIIHHLKRPPNPLLDPNNLNSEDMDILMERNLRTPNLLAFVRAVKHLENASGIEAILRNLQPCLPSATAAPSRHPIIIKAGDWQEFREKLTFYLVTLEQAQEQQYVEGGGGSPGEPSGPISTINPSPPSKESHKSPNMAPPSCLRFVQTNISRLLQETSEQLVALKPWITRQNFSRCLELQCQPDSSTLGGGSGGGSGGGSGTQDCSFQHSPISSDFAVKIRELSDYLLQDYPVTVASNLQDEELCGGLWRLVLAQRWMERLKTVAGSKMQGLLERVNTEIHFVTKCAFQP

SEQ ID NO: 73 - protein, 301 aa, Unknown
  MUTAGEN 1-301: progenipoeitin protein
ANCSIMIDEIIHHLKRPPNPLLDPNNLNSEDMDILMERNLRTPNLLAFVRAVKHLENASGIEAILRNLQPCLPSATAAPSRHPIIIKAGDWQEFREKLTFYLVTLEQAQEQQYVEGGGGSPGEPSGPISTINPSPPSKESHKSPNMAPPSCLRFVQTNISRLLQETSEQLVALKPWITRQNFSRCLELQCQPDSSTLGGGSGGGSGGGSGGGTQDCSFQHSPISSDFAVKIRELSDYLLQDYPVTVASNLQDEELCGGLWRLVLAQRWMERLKTVAGSKMQGLLERVNTEIHFVTKCAFQP

SEQ ID NO: 74 - protein, 307 aa, Unknown
  MUTAGEN 1-307: progenipoeitin protein
ANCSIMIDEIIHHLKRPPNPLLDPNNLNSEDMDILMERNLRTPNLLAFVRAVKHLENASGIEAILRNLQPCLPSATAAPSRHPIIIKAGDWQEFREKLTFYLVTLEQAQEQQYVEGGGGSPGEPSGPISTINPSPPSKESHKSPNMAPPSCLRFVQTNISRLLQETSEQLVALKPWITRQNFSRCLELQCQPDSSTLGGGSGGGSGGGSGGGSGGGSGTQDCSFQHSPISSDFAVKIRELSDYLLQDYPVTVASNLQDEELCGGLWRLVLAQRWMERLKTVAGSKMQGLLERVNTEIHFVTKCAFQP

SEQ ID NO: 75 - protein, 296 aa, Unknown
  MUTAGEN 1-296: progenipoeitin protein
ANCSIMIDEIIHHLKRPPNPLLDPNNLNSEDMDILMERNLRTPNLLAFVRAVKHLENASGIEAILRNLQPCLPSATAAPSRHPIIIKAGDWQEFREKLTFYLVTLEQAQEQQYVEGGGGSPGEPSGPISTINPSPPSKESHKSPNMADYPVTVASNLQDEELCGGLWRLVLAQRWMERLKTVAGSKMQGLLERVNTEIHFVTKCAFQPPPSCLRFVQTNISRLLQETSEQLVALKPWITRQNFSRCLELQCQPDSSTLGGGSGGGSGGTQDCSFQHSPISSDFAVKIRELSDYLLQ

SEQ ID NO: 76 - protein, 301 aa, Unknown
  MUTAGEN 1-301: progenipoeitin protein
ANCSIMIDEIIHHLKRPPNPLLDPNNLNSEDMDILMERNLRTPNLLAFVRAVKHLENASGIEAILRNLQPCLPSATAAPSRHPIIIKAGDWQEFREKLTFYLVTLEQAQEQQYVEGGGGSPGEPSGPISTINPSPPSKESHKSPNMADYPVTVASNLQDEELCGGLWRLVLAQRWMERLKTVAGSKMQGLLERVNTEIHFVTKCAFQPPPSCLRFVQTNISRLLQETSEQLVALKPWITRQNFSRCLELQCQPDSSTLGGGSGGGSGGGSGGGTQDCSFQHSPISSDFAVKIRELSDYLLQ

SEQ ID NO: 77 - protein, 296 aa, Unknown
  MUTAGEN 1-296: progenipoeitin protein
ANCSIMIDEIIHHLKRPPNPLLDPNNLNSEDMDILMERNLRTPNLLAFVRAVKHLENASGIEAILRNLQPCLPSATAAPSRHPIIIKAGDWQEFREKLTFYLVTLEQAQEQQYVEGGGGSPGEPSGPISTINPSPPSKESHKSPNMAASNLQDEELCGGLWRLVLAQRWMERLKTVAGSKMQGLLERVNTEIHFVTKCAFQPPPSCLRFVQTNISRLLQETSEQLVALKPWITRQNFSRCLELQCQPDSSTLGGGSGGGSGGTQDCSFQHSPISSDFAVKIRELSDYLLQDYPVTV

SEQ ID NO: 78 - protein, 301 aa, Unknown
  MUTAGEN 1-301: progenipoeitin protein
ANCSIMIDEIIHHLKRPPNPLLDPNNLNSEDMDILMERNLRTPNLLAFVRAVKHLENASGIEAILRNLQPCLPSATAAPSRHPIIIKAGDWQEFREKLTFYLVTLEQAQEQQYVEGGGGSPGEPSGPISTINPSPPSKESHKSPNMAASNLQDEELCGGLWRLVLAQRWMERLKTVAGSKMQGLLERVNTEIHFVTKCAFQPPPSCLRFVQTNISRLLQETSEQLVALKPWITRQNFSRCLELQCQPDSSTLGGGSGGGSGGGSGGGTQDCSFQHSPISSDFAVKIRELSDYLLQDYPVTV

SEQ ID NO: 79 - protein, 296 aa, Unknown
  MUTAGEN 1-296: progenipoeitin protein
ANCSIMIDEIIHHLKRPPNPLLDPNNLNSEDMDILMERNLRTPNLLAFVRAVKHLENASGIEAILRNLQPCLPSATAAPSRHPIIIKAGDWQEFREKLTFYLVTLEQAQEQQYVEGGGGSPGEPSGPISTINPSPPSKESHKSPNMAVAGSKMQGLLERVNTEIHFVTKCAFQPPPSCLRFVQTNISRLLQETSEQLVALKPWITRQNFSRCLELQCQPDSSTLGGGSGGGSGGTQDCSFQHSPISSDFAVKIRELSDYLLQDYPVTVASNLQDEELCGGLWRLVLAQRWMERLKT

SEQ ID NO: 80 - protein, 301 aa, Unknown
  MUTAGEN 1-301: progenipoeitin protein
ANCSIMIDEIIHHLKRPPNPLLDPNNLNSEDMDILMERNLRTPNLLAFVRAVKHLENASGIEAILRNLQPCLPSATAAPSRHPIIIKAGDWQEFREKLTFYLVTLEQAQEQQYVEGGGGSPGEPSGPISTINPSPPSKESHKSPNMAVAGSKMQGLLERVNTEIHFVTKCAFQPPPSCLRFVQTNISRLLQETSEQLVALKPWITRQNFSRCLELQCQPDSSTLGGGSGGGSGGGSGGGTQDCSFQHSPISSDFAVKIRELSDYLLQDYPVTVASNLQDEELCGGLWRLVLAQRWMERLKT

SEQ ID NO: 81 - protein, 296 aa, Unknown
  MUTAGEN 1-296: progenipoeitin protein
ANCSIMIDEIIHHLKRPPNPLLDPNNLNSEDMDILMERNLRTPNLLAFVRAVKHLENASGIEAILRNLQPCLPSATAAPSRHPIIIKAGDWQEFREKLTFYLVTLEQAQEQQYVEGGGGSPGEPSGPISTINPSPPSKESHKSPNMARFVQTNISRLLQETSEQLVALKPWITRQNFSRCLELQCQPDSSTLGGGSGGGSGGTQDCSFQHSPISSDFAVKIRELSDYLLQDYPVTVASNLQDEELCGGLWRLVLAQRWMERLKTVAGSKMQGLLERVNTEIHFVTKCAFQPPPSCL

SEQ ID NO: 82 - protein, 301 aa, Unknown
  MUTAGEN 1-301: progenipoeitin protein
ANCSIMIDEIIHHLKRPPNPLLDPNNLNSEDMDILMERNLRTPNLLAFVRAVKHLENASGIEAILRNLQPCLPSATAAPSRHPIIIKAGDWQEFREKLTFYLVTLEQAQEQQYVEGGGGSPGEPSGPISTINPSPPSKESHKSPNMARFVQTNISRLLQETSEQLVALKPWITRQNFSRCLELQCQPDSSTLGGGSGGGSGGGSGGGTQDCSFQHSPISSDFAVKIRELSDYLLQDYPVTVASNLQDEELCGGLWRLVLAQRWMERLKTVAGSKMQGLLERVNTEIHFVTKCAFQPPPSCL

SEQ ID NO: 83 - protein, 296 aa, Unknown
  MUTAGEN 1-296: progenipoeitin protein
ANCSIMIDEIIHHLKRPPNPLLDPNNLNSEDMDILMERNLRTPNLLAFVRAVKHLENASGIEAILRNLQPCLPSATAAPSRHPIIIKAGDWQEFREKLTFYLVTLEQAQEQQYVEGGGSSPGEPSGPISTINPSPPSKESHKSPNMATNISRLLQETSEQLVALKPWITRQNFSRCLELQCQPDSSTLGGGSGGGSGGTQDCSFQHSPISSDFAVKIRELSDYLLQDYPVTVASNLQDEELCGGLWRLVLAQRWMERLKTVAGSKMQGLLERVNTEIHFVTKCAFQPPPSCLRFVQ

SEQ ID NO: 84 - protein, 301 aa, Unknown
  MUTAGEN 1-301: progenipoeitin protein
ANCSIMIDEIIHHLKRPPNPLLDPNNLNSEDMDILMERNLRTPNLLAFVRAVKHLENASGIEAILRNLQPCLPSATAAPSRHPIIIKAGDWQEFREKLTFYLVTLEQAQEQQYVEGGGGSPGEPSGPISTINPSPPSKESHKSPNMATNISRLLQETSEQLVALKPWITRQNFSRCLELQCQPDSSTLGGGSGGGSGGGSGGGTQDCSFQHSPISSDFAVKIRELSDYLLQDYPVTVASNLQDEELCGGLWRLVLAQRWMERLKTVAGSKMQGLLERVNTEIHFVTKCAFQPPPSCLRFVQ

SEQ ID NO: 85 - protein, 292 aa, Unknown
  MUTAGEN 1-292: progenipoeitin protein
ANCSIMIDEIIHHLKRPPNPLLDPNNLNSEDMDILMERNLRTPNLLAFVRAVKHLENASGIEAILRNLQPCLPSATAAPSRHPIIIKAGDWQEFREKLTFYLVTLEQAQEQQYVEGGGGSPGEPSGPISTINPSPPSKESHKSPNMADYPVTVASNLQDEELCGGLWRLVLAQRWMERLKTVAGSKMQGLLERVNTEIHFVTKCAFQPPPSCLRFVQTNISRLLQETSEQLVALKPWITRQNFSRCLELQCQPDSSTLGGGSGGTQDCSFQHSPISSDFAVKIRELSDYLLQ

SEQ ID NO: 86 - protein, 293 aa, Unknown
  MUTAGEN 1-293: progenipoeitin protein
ANCSIMIDEIIHHLKRPPNPLLDPNNLNSEDMDILMERNLRTPNLLAFVRAVKHLENASGIEAILRNLQPCLPSATAAPSRHPIIIKAGDWQEFREKLTFYLVTLEQAQEQQYVEGGGGSPGEPSGPISTINPSPPSKESHKSPNMADYPVTVASNLQDEELCGGLWRLVLAQRWMERLKTVAGSKMQGLLERVNTEIHFVTKCAFQPPPSCLRFVQTNISRLLQETSEQLVALKPWITRQNFSRCLELQCQPDSSTLGGGSGGGTQDCSFQHSPISSDFAVKIRELSDYLLQ

SEQ ID NO: 87 - protein, 299 aa, Unknown
  MUTAGEN 1-299: progenipoeitin protein
ANCSIMIDEIIHHLKRPPNPLLDPNNLNSEDMDILMERNLRTPNLLAFVRAVKHLENASGIEAILRNLQPCLPSATAAPSRHPIIIKAGDWQEFREKLTFYLVTLEQAQEQQYVEGGGGSPGEPSGPISTINPSPPSKESHKSPNMADYPVTVASNLQDEELCGGLWRLVLAQRWMERLKTVAGSKMQGLLERVNTEIHFVTKCAFQPPPSCLRFVQTNISRLLQETSEQLVALKPWITRQNFSRCLELQCQPDSSTLGGGSGGGSGGGSGTQDCSFQHSPISSDFAVKIRELSDYLLQ

SEQ ID NO: 88 - protein, 307 aa, Unknown
  MUTAGEN 1-307: progenipoeitin protein
ANCSIMIDEIIHHLKRPPNPLLDPNNLNSEDMDILMERNLRTPNLLAFVRAVKHLENASGIEAILRNLQPCLPSATAAPSRHPIIIKAGDWQEFREKLTFYLVTLEQAQEQQYVEGGGGSPGEPSGPISTINPSPPSKESHKSPNMAVAGSKMQGLLERVNTEIHFVTKCAFQPPPSCLRFVQTNISRLLQETSEQLVALKPWITRQNFSRCLELQCQPDSSTLGGGSGGGSGGGSGGGSGGGSGTQDCSFQHSPISSDFAVKIRELSDYLLQDYPVTVASNLQDEELCGGLWRLVLAQRWMERLKT

SEQ ID NO: 89 - protein, 292 aa, Unknown
  MUTAGEN 1-292: progenipoeitin protein
ANCSIMIDEIIHHLKRPPNPLLDPNNLNSEDMDILMERNLRTPNLLAFVRAVKHLENASGIEAILRNLQPCLPSATAAPSRHPIIIKAGDWQEFREKLTFYLVTLEQAQEQQYVEGGGGSPGEPSGPISTINPSPPSKESHKSPNMAASNLQDEELCGGLWRLVLAQRWMERLKTVAGSKMQGLLERVNTEIHFVTKCAFQPPPSCLRFVQTNISRLLQETSEQLVALKPWITRQNFSRCLELQCQPDSSTLGGGSGGTQDCSFQHSPISSDFAVKIRELSDYLLQDYPVTV

SEQ ID NO: 90 - protein, 293 aa, Unknown
  MUTAGEN 1-293: progenipoeitin protein
ANCSIMIDEIIHHLKRPPNPLLDPNNLNSEDMDILMERNLRTPNLLAFVRAVKHLENASGIEAILRNLQPCLPSATAAPSRHPIIIKAGDWQEFREKLTFYLVTLEQAQEQQYVEGGGGSPGEPSGPISTINPSPPSKESHKSPNMAASNLQDEELCGGLWRLVLAQRWMERLKTVAGSKMQGLLERVNTEIHFVTKCAFQPPPSCLRFVQTNISRLLQETSEQLVALKPWITRQNFSRCLELQCQPDSSTLGGGSGGGTQDCSFQHSPISSDFAVKIRELSDYLLQDYPVTV

SEQ ID NO: 91 - protein, 299 aa, Unknown
  MUTAGEN 1-299: progenipoeitin protein
ANCSIMIDEIIHHLKRPPNPLLDPNNLNSEDMDILMERNLRTPNLLAFVRAVKHLENASGIEAILRNLQPCLPSATAAPSRHPIIIKAGDWQEFREKLTFYLVTLEQAQEQQYVEGGGGSPGEPSGPISTINPSPPSKESHKSPNMAASNLQDEELCGGLWRLVLAQRWMERLKTVAGSKMQGLLERVNTEIHFVTKCAFQPPPSCLRFVQTNISRLLQETSEQLVALKPWITRQNFSRCLELQCQPDSSTLGGGSGGGSGGGSGTQDCSFQHSPISSDFAVKIRELSDYLLQDYPVTV

SEQ ID NO: 92 - protein, 307 aa, Unknown
  MUTAGEN 1-307: progenipoeitin protein
ANCSIMIDEIIHHLKRPPNPLLDPNNLNSEDMDILMERNLRTPNLLAFVRAVKHLENASGIEAILRNLQPCLPSATAAPSRHPIIIKAGDWQEFREKLTFYLVTLEQAQEQQYVEGGGGSPGEPSGPISTINPSPPSKESHKSPNMAASNLQDEELCGGLWRLVLAQRWMERLKTVAGSKMQGLLERVNTEIHFVTKCAFQPPPSCLRFVQTNISRLLQETSEQLVALKPWITRQNFSRCLELQCQPDSSTLGGGSGGGSGGGSGGGSGGGSGTQDCSFQHSPISSDFAVKIRELSDYLLQDYPVTV

SEQ ID NO: 93 - protein, 292 aa, Unknown
  MUTAGEN 1-292: progenipoeitin protein
ANCSIMIDEIIHHLKRPPNPLLDPNNLNSEDMDILMERNLRTPNLLAFVRAVKHLENASGIEAILRNLQPCLPSATAAPSRHPIIIKAGDWQEFREKLTFYLVTLEQAQEQQYVEGGGGSPGEPSGPISTINPSPPSKESHKSPNMAVAGSKMQGLLERVNTEIHFVTKCAFQPPPSCLRFVQTNISRLLQETSEQLVALKPWITRQNFSRCLELQCQPDSSTLGGGSGGTQDCSFQHSPISSDFAVKIRELSDYLLQDYPVTVASNLQDEELCGGLWRLVLAQRWMERLKT

SEQ ID NO: 94 - protein, 293 aa, Unknown
  MUTAGEN 1-293: progenipoeitin protein
ANCSIMIDEIIHHLKRPPNPLLDPNNLNSEDMDILMERNLRTPNLLAFVRAVKHLENASGIEAILRNLQPCLPSATAAPSRHPIIIKAGDWQEFREKLTFYLVTLEQAQEQQYVEGGGGSPGEPSGPISTINPSPPSKESHKSPNMAVAGSKMQGLLERVNTEIHFVTKCAFQPPPSCLRFVQTNISRLLQETSEQLVALKPWITRQNFSRCLELQCQPDSSTLGGGSGGGTQDCSFQHSPISSDFAVKIRELSDYLLQDYPVTVASNLQDEELCGGLWRLVLAQRWMERLKT

SEQ ID NO: 95 - protein, 299 aa, Unknown
  MUTAGEN 1-299: progenipoeitin protein
ANCSIMIDEIIHHLKRPPNPLLDPNNLNSEDMDILMERNLRTPNLLAFVRAVKHLENASGIEAILRNLQPCLPSATAAPSRHPIIIKAGDWQEFREKLTFYLVTLEQAQEQQYVEGGGGSPGEPSGPISTINPSPPSKESHKSPNMAVAGSKMQGLLERVNTEIHFVTKCAFQPPPSCLRFVQTNISRLLQETSEQLVALKPWITRQNFSRCLELQCQPDSSTLGGGSGGGSGGGSGTQDCSFQHSPISSDFAVKIRELSDYLLQDYPVTVASNLQDEELCGGLWRLVLAQRWMERLKT

SEQ ID NO: 96 - protein, 307 aa, Unknown; identical to SEQ ID NO: 88
  MUTAGEN 1-307: progenipoeitin protein

SEQ ID NO: 97 - protein, 292 aa, Unknown
  MUTAGEN 1-292: progenipoeitin protein
ANCSIMIDEIIHHLKRPPNPLLDPNNLNSEDMDILMERNLRTPNLLAFVRAVKHLENASGIEAILRNLQPCLPSATAAPSRHPIIIKAGDWQEFREKLTFYLVTLEQAQEQQYVEGGGGSPGEPSGPISTINPSPPSKESHKSPNMARFVQTNISRLLQETSEQLVALKPWITRQNFSRCLELQCQPDSSTLGGGSGGTQDCSFQHSPISSDFAVKIRELSDYLLQDYPVTVASNLQDEELCGGLWRLVLAQRWMERLKTVAGSKMQGLLERVNTEIHFVTKCAFQPPPSCL

SEQ ID NO: 98 - protein, 293 aa, Unknown
  MUTAGEN 1-293: progenipoeitin protein
ANCSIMIDEIIHHLKRPPNPLLDPNNLNSEDMDILMERNLRTPNLLAFVRAVKHLENASGIEAILRNLQPCLPSATAAPSRHPIIIKAGDWQEFREKLTFYLVTLEQAQEQQYVEGGGGSPGEPSGPISTINPSPPSKESHKSPNMARFVQTNISRLLQETSEQLVALKPWITRQNFSRCLELQCQPDSSTLGGGSGGGTQDCSFQHSPISSDFAVKIRELSDYLLQDYPVTVASNLQDEELCGGLWRLVLAQRWMERLKTVAGSKMQGLLERVNTEIHFVTKCAFQPPPSCL

SEQ ID NO: 99 - protein, 299 aa, Unknown
  MUTAGEN 1-299: progenipoeitin protein
ANCSIMIDEIIHHLKRPPNPLLDPNNLNSEDMDILMERNLRTPNLLAFVRAVKHLENASGIEAILRNLQPCLPSATAAPSRHPIIIKAGDWQEFREKLTFYLVTLEQAQEQQYVEGGGGSPGEPSGPISTINPSPPSKESHKSPNMARFVQTNISRLLQETSEQLVALKPWITRQNFSRCLELQCQPDSSTLGGGSGGGSGGGSGTQDCSFQHSPISSDFAVKIRELSDYLLQDYPVTVASNLQDEELCGGLWRLVLAQRWMERLKTVAGSKMQGLLERVNTEIHFVTKCAFQPPPSCL

SEQ ID NO: 100 - protein, 307 aa, Unknown
  MUTAGEN 1-307: progenipoeitin protein
ANCSIMIDEIIHHLKRPPNPLLDPNNLNSEDMDILMERNLRTPNLLAFVRAVKHLENASGIEAILRNLQPCLPSATAAPSRHPIIIKAGDWQEFREKLTFYLVTLEQAQEQQYVEGGGGSPGEPSGPISTINPSPPSKESHKSPNMARFVQTNISRLLQETSEQLVALKPWITRQNFSRCLELQCQPDSSTLGGGSGGGSGGGSGGGSGGGSGTQDCSFQHSPISSDFAVKIRELSDYLLQDYPVTVASNLQDEELCGGLWRLVLAQRWMERLKTVAGSKMQGLLERVNTEIHFVTKCAFQPPPSCL

SEQ ID NO: 101 - protein, 292 aa, Unknown
  MUTAGEN 1-292: progenipoeitin protein
ANCSIMIDEIIHHLKRPPNPLLDPNNLNSEDMDILMERNLRTPNLLAFVRAVKHLENASGIEAILRNLQPCLPSATAAPSRHPIIIKAGDWQEFREKLTFYLVTLEQAQEQQYVEGGGSSPGEPSGPISTINPSPPSKESHKSPNMATNISRLLQETSEQLVALKPWITRQNFSRCLELQCQPDSSTLGGGSGGTQDCSFQHSPISSDFAVKIRELSDYLLQDYPVTVASNLQDEELCGGLWRLVLAQRWMERLKTVAGSKMQGLLERVNTEIHFVTKCAFQPPPSCLRFVQ

SEQ ID NO: 102 - protein, 293 aa, Unknown
  MUTAGEN 1-293: progenipoeitin protein
ANCSIMIDEIIHHLKRPPNPLLDPNNLNSEDMDILMERNLRTPNLLAFVRAVKHLENASGIEAILRNLQPCLPSATAAPSRHPIIIKAGDWQEFREKLTFYLVTLEQAQEQQYVEGGGSSPGEPSGPISTINPSPPSKESHKSPNMATNISRLLQETSEQLVALKPWITRQNFSRCLELQCQPDSSTLGGGSGGGTQDCSFQHSPISSDFAVKIRELSDYLLQDYPVTVASNLQDEELCGGLWRLVLAQRWMERLKTVAGSKMQGLLERVNTEIHFVTKCAFQPPPSCLRFVQ

SEQ ID NO: 103 - protein, 299 aa, Unknown
  MUTAGEN 1-299: progenipoeitin protein
ANCSIMIDEIIHHLKRPPNPLLDPNNLNSEDMDILMERNLRTPNLLAFVRAVKHLENASGIEAILRNLQPCLPSATAAPSRHPIIIKAGDWQEFREKLTFYLVTLEQAQEQQYVEGGGSSPGEPSGPISTINPSPPSKESHKSPNMATNISRLLQETSEQLVALKPWITRQNFSRCLELQCQPDSSTLGGGSGGGSGGGSGTQDCSFQHSPISSDFAVKIRELSDYLLQDYPVTVASNLQDEELCGGLWRLVLAQRWMERLKTVAGSKMQGLLERVNTEIHFVTKCAFQPPPSCLRFVQ

SEQ ID NO: 104 - protein, 307 aa, Unknown
  MUTAGEN 1-307: progenipoeitin protein
ANCSIMIDEIIHHLKRPPNPLLDPNNLNSEDMDILMERNLRTPNLLAFVRAVKHLENASGIEAILRNLQPCLPSATAAPSRHPIIIKAGDWQEFREKLTFYLVTLEQAQEQQYVEGGGGSPGEPSGPISTINPSPPSKESHKSPNMATNISRLLQETSEQLVALKPWITRQNFSRCLELQCQPDSSTLGGGSGGGSGGGSGGGSGGGSGTQDCSFQHSPISSDFAVKIRELSDYLLQDYPVTVASNLQDEELCGGLWRLVLAQRWMERLKTVAGSKMQGLLERVNTEIHFVTKCAFQPPPSCLRFVQ

SEQ ID NO: 105 - protein, 749 aa, Unknown [sequence omitted]

SEQ ID NO: 106 - protein, 349 aa, Unknown
  MUTAGEN 1-349: progenipoeitin protein
ATPLGPASSLPQSFLLKSLEQVRKIQGDGAALQEKLCATYKLCHPEELVLLGHSLGIPWAPLSSCPSQALQLAGCLSQLHSGLFLYQGLLQALEGISPELGPTLDTLQLDVADFATTIWQQMEELGMAPALQPTQGAMPAFASAFQRRAGGVLVASHLQSFLEVSYRVLRHLAQPYVEGGGGSPGEPSGPISTINPSPPSKESHKSPNMATQDCSFQHSPISSDFAVKIRELSDYLLQDYPVTVASNLQDEELCGGLWRLVLAQRWMERLKTVAGSKMQGLLERVNTEIHFVTKCAFQPPPSCLRFVQTNISRLLQETSEQLVALKPWITRQNFSRCLELQCQPDSSTL

SEQ ID NO: 107 - protein, 314 aa, Unknown
  MUTAGEN 1-314: progenipoeitin protein
ATQDCSFQHSPISSDFAVKIRELSDYLLQDYPVTVASNLQDEELCGGLWRLVLAQRWMERLKTVAGSKMQGLLERVNTEIHFVTKCAFQPPPSCLRFVQTNISRLLQETSEQLVALKPWITRQNFSRCLELQCQPDSSTLYVEGGGGSPGEPSGPISTINPSPPSKESHKSPNMATQDCSFQHSPISSDFAVKIRELSDYLLQDYPVTVASNLQDEELCGGLWRLVLAQRWMERLKTVAGSKMQGLLERVNTEIHFVTKCAFQPPPSCLRFVQTNISRLLQETSEQLVALKPWITRQNFSRCLELQCQPDSSTL

SEQ ID NO: 108 - protein, 349 aa, Unknown
  MUTAGEN 1-349: progenipoeitin protein
ATQDCSFQHSPISSDFAVKIRELSDYLLQDYPVTVASNLQDEELCGGLWRLVLAQRWMERLKTVAGSKMQGLLERVNTEIHFVTKCAFQPPPSCLRFVQTNISRLLQETSEQLVALKPWITRQNFSRCLELQCQPDSSTLYVEGGGGSPGEPSGPISTINPSPPSKESHKSPNMATPLGPASSLPQSFLLKCLEQVRKIQGDGAALQEKLCATYKLCHPEELVLLGHSLGIPWAPLSSCPSQALQLAGCLSQLHSGLFLYQGLLQALEGISPELGPTLDTLQLDVADFATTIWQQMEELGMAPALQPTQGAMPAFASAFQRRAGGVLVASHLQSFLEVSYRVLRHLAQP

SEQ ID NO: 109 - protein, 523 aa, Unknown
  MUTAGEN 1-523: progenipoeitin protein
ATPLGPASSLPQSFLLKSLEQVRKIQGDGAALQEKLCATYKLCHPEELVLLGHSLGIPWAPLSSCPSQALQLAGCLSQLHSGLFLYQGLLQALEGISPELGPTLDTLQLDVADFATTIWQQMEELGMAPALQPTQGAMPAFASAFQRRAGGVLVASHLQSFLEVSYRVLRHLAQPYVEGGGGSPGEPSGPISTINPSPPSKESHKSPNMATQDCSFQHSPISSDFAVKIRELSDYLLQDYPVTVASNLQDEELCGGLWRLVLAQRWMERLKTVAGSKMQGLLERVNTEIHFVTKCAFQPPPSCLRFVQTNISRLLQETSEQLVALKPWITRQNFSRCLELQCQPDSSTLYVEGGGGSPGEPSGPISTINPSPPSKESHKSPNMATQDCSFQHSPISSDFAVKIRELSDYLLQDYPVTVASNLQDEELCGGLWRLVLAQRWMERLKTVAGSKMQGLLERVNTEIHFVTKCAFQPPPSCLRFVQTNISRLLQETSEQLVALKPWITRQNFSRCLELQCQPDSSTL

SEQ ID NO: 110 - protein, 460 aa, Unknown
  MUTAGEN 1-460: progenipoeitin protein
ANCSIMIDEIIHHLKRPPAPLLDPNNLNDEDVSILMDRNLRLPNLESFVRAVKNLENASGIEAILRNLQPCLPSATAAPSRHPIIIKAGDWQEFREKLTFYLVTLEQAQEQQYVEGGGGSPGEPSGPISTINPSPPSKESHKSPNMATQDCSFQHSPISSDFAVKIRELSDYLLQDYPVTVASNLQDEELCGGLWRLVLAQRWMERLKTVAGSKMQGLLERVNTEIHFVTKCAFQPPPSCLRFVQTNISRLLQETSEQLVALKPWITRQNFSRCLELQCQPDSSTLYVEGGGGSPGEPSGPISTINPSPPSKESHKSPNMATQDCSFQHSPISSDFAVKIRELSDYLLQDYPVTVASNLQDEELCGGLWRLVLAQRWMERLKTVAGSKMQGLLERVNTEIHFVTKCAFQPPPSCLRFVQTNISRLLQETSEQLVALKPWITRQNFSRCLELQCQPDSSTL

SEQ ID NO: 111 - protein, 523 aa, Unknown
  MUTAGEN 1-523: progenipoeitin protein
ATQDCSFQHSPISSDFAVKIRELSDYLLQDYPVTVASNLQDEELCGGLWRLVLAQRWMERLKTVAGSKMQGLLERVNTEIHFVTKCAFQPPPSCLRFVQTNISRLLQETSEQLVALKPWITRQNFSRCLELQCQPDSSTLYVEGGGGSPGEPSGPISTINPSPPSKESHKSPNMATPLGPASSLPQSFLLKSLEQVRKIQGDGAALQEKLCATYKLCHPEELVLLGHSLGIPWAPLSSCPSQALQLAGCLSQLHSGLFLYQGLLQALEGISPELGPTLDTLQLDVADFATTIWQQMEELGMAPALQPTQGAMPAFASAFQRRAGGVLVASHLQSFLEVSYRVLRHLAQPYVEGGGGSPGEPSGPISTINPSPPSKESHKSPNMATQDCSFQHSPISSDFAVKIRELSDYLLQDYPVTVASNLQDEELCGGLWRLVLAQRWMERLKTVAGSKMQGLLERVNTEIHFVTKCAFQPPPSCLRFVQTNISRLLQETSEQLVALKPWITRQNFSRCLELQCQPDSSTL

SEQ ID NO: 112 - protein, 334 aa, Unknown
  MUTAGEN 1-334: progenipoeitin protein
ATQDCSFQHSPISSDFAVKIRELSDYLLQDYPVTVASNLQDEELCGGLWRLVLAQRWMERLKTVAGSKMQGLLERVNTEIHFVTKCAFQPPPSCLRFVQTNISRLLQETSEQLVALKPWITRQNFSRCLELQCQPDSSTLYVEGGGGSPGGGSGGGSNMATPLGPASSLPQSFLLKSLEQVRKIQGDGAALQEKLCATYKLCHPEELVLLGHSLGIPWAPLSSCPSQALQLAGCLSQLHSGLFLYQGLLQALEGISPELGPTLDTLQLDVADFATTIWQQMEELGMAPALQPTQGAMPAFASAFQRRAGGVLVASHLQSFLEVSYRVLRHLAQP

SEQ ID NO: 113 - protein, 296 aa, Unknown; identical to SEQ ID NO: 75
  MUTAGEN 1-296: progenipoeitin protein

SEQ ID NO: 114 - protein, 301 aa, Unknown; identical to SEQ ID NO: 76
  MUTAGEN 1-301: progenipoeitin protein

SEQ ID NO: 115 - protein, 296 aa, Unknown; identical to SEQ ID NO: 77
  MUTAGEN 1-296: progenipoeitin protein

SEQ ID NO: 116 - protein, 301 aa, Unknown; identical to SEQ ID NO: 78
  MUTAGEN 1-301: progenipoeitin protein

SEQ ID NO: 117 - protein, 296 aa, Unknown; identical to SEQ ID NO: 79
  MUTAGEN 1-296: progenipoeitin protein

SEQ ID NO: 118 - protein, 301 aa, Unknown; identical to SEQ ID NO: 80
  MUTAGEN 1-301: progenipoeitin protein

SEQ ID NO: 119 - protein, 296 aa, Unknown; identical to SEQ ID NO: 81
  MUTAGEN 1-296: progenipoeitin protein

SEQ ID NO: 120 - protein, 301 aa, Unknown; identical to SEQ ID NO: 82
  MUTAGEN 1-301: progenipoeitin protein

SEQ ID NO: 121 - protein, 296 aa, Unknown; identical to SEQ ID NO: 83
  MUTAGEN 1-296: progenipoeitin protein

SEQ ID NO: 122 - protein, 301 aa, Unknown; identical to SEQ ID NO: 84
  MUTAGEN 1-301: progenipoeitin protein

SEQ ID NO: 123 - protein, 307 aa, Unknown
  MUTAGEN 1-307: progenipoeitin protein
ANCSIMIDEIIHHLKRPPNPLLDPNNLNSEDMDILMERNLRTPNLLAFVRAVKHLENASGIEAILRNLQPCLPSATAAPSRHPIIIKAGDWQEFREKLTFYLVTLEQAQEQQYVEGGGGSPGEPSGPISTINPSPPSKESHKSPNMASNLQDEELCGGLWRLVLAQRWMERLKTVAGSKMQGLLERVNTEIHFVTKCAFQPPPSCLRFVQTNISRLLQETSEQLVALKPWITRQNFSRCLELQCQPDSSTLGGGSGGGSGGGSGGGSGGGSGTQDCSFQHSPISSDFAVKIRELSDYLLQDYPVTVA

SEQ ID NO: 124 - protein, 307 aa, Unknown
  MUTAGEN 1-307: progenipoeitin protein
ANCSIMIDEIIHHLKRPPNPLLDPNNLNSEDMDILMERNLRTPNLLAFVRAVKHLENASGIEAILRNLQPCLPSATAAPSRHPIIIKAGDWQEFREKLTFYLVTLEQAQEQQYVEGGGGSPGEPSGPISTINPSPPSKESHKSPNMANLQDEELCGGLWRLVLAQRWMERLKTVAGSKMQGLLERVNTEIHFVTKCAFQPPPSCLRFVQTNISRLLQETSEQLVALKPWITRQNFSRCLELQCQPDSSTLGGGSGGGSGGGSGGGSGGGSGTQDCSFQHSPISSDFAVKIRELSDYLLQDYPVTVAS

SEQ ID NO: 125 - protein, 307 aa, Unknown
  MUTAGEN 1-307: progenipoeitin protein
ANCSIMIDEIIHHLKRPPNPLLDPNNLNSEDMDILMERNLRTPNLLAFVRAVKHLENASGIEAILRNLQPCLPSATAAPSRHPIIIKAGDWQEFREKLTFYLVTLEQAQEQQYVEGGGGSPGEPSGPISTINPSPPSKESHKSPNMALQDEELCGGLWRLVLAQRWMERLKTVAGSKMQGLLERVNTEIHFVTKCAFQPPPSCLRFVQTNISRLLQETSEQLVALKPWITRQNFSRCLELQCQPDSSTLGGGSGGGSGGGSGGGSGGGSGTQDCSFQHSPISSDFAVKIRELSDYLLQDYPVTVASN

SEQ ID NO: 126 - protein, 307 aa, Unknown
  MUTAGEN 1-307: progenipoeitin protein
ANCSIMIDEIIHHLKRPPNPLLDPNNLNSEDMDILMERNLRTPNLLAFVRAVKHLENASGIEAILRNLQPCLPSATAAPSRHPIIIKAGDWQEFREKLTFYLVTLEQAQEQQYVEGGGGSPGEPSGPISTINPSPPSKESHKSPNMAQDEELCGGLWRLVLAQRWMERLKTVAGSKMQGLLERVNTEIHFVTKCAFQPPPSCLRFVQTNISRLLQETSEQLVALKPWITRQNFSRCLELQCQPDSSTLGGGSGGGSGGGSGGGSGGGSGTQDCSFQHSPISSDFAVKIRELSDYLLQDYPVTVASNL

SEQ ID NO: 127 - protein, 305 aa, Unknown
  MUTAGEN 1-305: progenipoeitin protein
ANCSIMIDEIIHHLKRPPNPLLDPNNLNSEDMDILRNLRTPNLLAFVRAVKHLENASGIEAILRNLQPCLPSATAAPSRHPIIIKAGDWQEFREKLTFYLVTLEQAQEQQYVEGGGGSPGEPSGPISTINPSPPSKESHKSPNMAEELCGGLWRLVLAQRWMERLKTVAGSKMQGLLERVNTEIHFVTKCAFQPPPSCLRFVQTNISRLLQETSEQLVALKPWITRQNFSRCLELQCQPDSSTLGGGSGGGSGGGSGGGSGGGSGTQDCSFQHSPISSDFAVKIRELSDYLLQDYPVTVASNLQD

SEQ ID NO: 128 - protein, 307 aa, Unknown
  MUTAGEN 1-307: progenipoeitin protein
ANCSIMIDEIIHHLKRPPNPLLDPNNLNSEDMDILMERNLRTPNLLAFVRAVKHLENASGIEAILRNLQPCLPSATAAPSRHPIIIKAGDWQEFREKLTFYLVTLEQAQEQQYVEGGGGSPGEPSGPISTINPSPPSKESHKSPNMAELCGGLWRLVLAQRWMERLKTVAGSKMQGLLERVNTEIHFVTKCAFQPPPSCLRFVQTNISRLLQETSEQLVALKPWITRQNFSRCLELQCQPDSSTLGGGSGGGSGGGSGGGSGGGSGTQDCSFQHSPISSDFAVKIRELSDYLLQDYPVTVASNLQDE

SEQ ID NO: 129 - protein, 307 aa, Unknown
  MUTAGEN 1-307: progenipoeitin protein
ANCSIMIDEIIHHLKRPPNPLLDPNNLNSEDMDILMERNLRTPNLLAFVRAVKHLENASGIEAILRNLQPCLPSATAAPSRHPIIIKAGDWQEFREKLTFYLVTLEQAQEQQYVEGGGGSPGEPSGPISTINPSPPSKESHKSPNMALCGGLWRLVLAQRWMERLKTVAGSKMQGLLERVNTEIHFVTKCAFQPPPSCLRFVQTNISRLLQETSEQLVALKPWITRQNFSRCLELQCQPDSSTLGGGSGGGSGGGSGGGSGGGSGTQDCSFQHSPISSDFAVKIRELSDYLLQDYPVTVASNLQDEE

SEQ ID NO: 130 - protein, 307 aa, Unknown
  MUTAGEN 1-307: progenipoeitin protein
ANCSIMIDEIIHHLKRPPNPLLDPNNLNSEDMDILMERNLRTPNLLAFVRAVKHLENASGIEAILRNLQPCLPSATAAPSRHPIIIKAGDWQEFREKLTFYLVTLEQAQEQQYVEGGGGSPGEPSGPISTINPSPPSKESHKSPNMASNLQDEELCGGLWRLVLAQRWMERLKTVAGSKMQGLLERVNTEIHFVTKCAFQPPPSCLRFVQTNISRLLQETSEQLVALKPWITRQNFSRCLELQCQPDSSTLGGGSGGGSGGGSGGGSGGGSGTQDCSFQHSPISSDSAVKIRELSDYLLQDYPVTVA

SEQ ID NO: 131 - protein, 307 aa, Unknown
  MUTAGEN 1-307: progenipoeitin protein
ANCSIMIDEIIHHLKRPPNPLLDPNNLNSEDMDILMERNLRTPNLLAFVRAVKHLENASGIEAILRNLQPCLPSATAAPSRHPIIIKAGDWQEFREKLTFYLVTLEQAQEQQYVEGGGGSPGEPSGPISTINPSPPSKESHKSPNMAQDEELCGGLWRLVLAQRWMERLKTVAGSKMQGLLERVNTEIHFVTKCAFQPPPSCLRFVQTNISRLLRETSEQPVALKPWITRQNFSRCLELQCQPDSSTLGGGSGGGSGGGSGGGSGGGSGTQDCSFQHSPISSDFAVKIRELSDYLLQDYPVTVASNL

SEQ ID NO: 132 - protein, 307 aa, Unknown
  MUTAGEN 1-307: progenipoeitin protein
ANCSIMIDEIIHHLKRPPNPLLDPNNLNSEDMDILMERNLRTPNLLAFVRAVKHLENASGIEAILRNLQPCLPSATAAPSRHPIIIKAGDWQEFREKLTFYLVTLEQAQEQQYVEGGGGSPGEPSGPISTINPSPPSKESHKSPNMALCGGLWRLVLAQRWMERLKTVAGSKMQGLLERVNTEIHFVTKCAFQPPPSCLRFVQTNISRLLQETSEQLVALKPWITRQNFSRCLELQCRPDSSTLGGGSGGGSGGGSGGGSGGGSGTQDCSFQHSPISSDFAVKIRELSDYLLQDYPVTVASNLQDEE

SEQ ID NO: 133 - protein, 302 aa, Unknown
  MUTAGEN 1-302: progenipoeitin protein
ADEELCGGLWRLVLAQRWMERLKTVAGSKMQGLLERVNTEIHFVTKCAFQPPPSCLRFVQTNISRLLQETSEQLVALKPWITRQNFSRCLELQCQPDSSTLGGGSGGGSGGGSGGGSGGGSGTQDCSFQHSPISSDFAVKIRELSDYLLQDYPVTVYVEGGGGSPGEPSGPISTINPSPPSKESHKSPNMANCSIMIDEIIHHLKRPPNPLLDPNNLNSEDMDILMERNLRTPNLLAFVRAVKHLENASGIEAILRNLQPCLPSATAAPSRHPIIIKAGDWQEFREKLTFYLVTLEQAQEQQ

SEQ ID NO: 134 - protein, 296 aa, Unknown
  MUTAGEN 1-296: progenipoeitin protein
ADEELCGGLWRLVLAQRWMERLKTVAGSKMQGLLERVNTEIHFVTKCAFQPPPSCLRFVQTNISRLLQETSEQLVALRPWITRQNFSRCLELQCQPDSSTLGGGSGGGSGGTQDCSFQHSPISSDFAVKIRELSDYLLQDYPVTVASNLQYVEGGGGSPGEPSGPISTINPSPPSKESHKSPNMANCSIMIDEIIHHLKRPPNPLLDPNNLNSEDMDILMERNLRTPNLLAFVRAVKHLENASGIEAILRNLQPCLPSATAAPSRHPIIIKAGDWQEFREKLTFYLVTLEQAQEQQ

SEQ ID NO: 135 - protein, 301 aa, Unknown
  MUTAGEN 1-301: progenipoeitin protein
ADEELCGGLWRLVLAQRWMERLKTVAGSKMQGLLERVNTEIHFVTKCAFQPPPSCLRFVQTNISRLLQETSEQLVALKPWITRQNFSRCLELQCQPDSSTLGGGSGGGSGGGSGGGTQDCSFQHSPISSDFAVKIRELSDYLLQDYPVTVASNLQYVEGGGGSPGEPSGPISTINPSPPSKESHKSPNMANCSIMIDEIIHHLKRPPNPLLDPNNLNSEDMDILMERNLRTPNLLAFVRAVKHLENASGIEAILRNLQPCLPSATAAPSRHPIIIKAGDWQEFREKLTFYLVTLEQAQEQQ

SEQ ID NO: 136 - protein, 307 aa, Unknown
  MUTAGEN 1-307: progenipoeitin protein
ADEELCGGLWRLVLAQRWMERLKTVAGSKMQGLLERVNTEIHFVTKCAFQPPPSCLRFVQTNISRLLQETSEQLVALKPWITRQNFSRCLELQCQPDSSTLGGGSGGGSGGGSGGGSGGGSGTQDCSFQHSPISSDFAVKIRELSDYLLQDYPVTVASNLQYVEGGGGSPGEPSGPISTINPSPPSKESHKSPNMANCSIMIDEIIHHLKRPPNPLLDPNNLNSEDMDILMERNLRTPNLLAFVRAVKHLENASGIEAILRNLQPCLPSATAAPSRHPIIIKAGDWQEFREKLTFYLVTLEQAQEQQ

SEQ ID NO: 137 - protein, 301 aa, Unknown
  MUTAGEN 1-301: progenipoeitin protein
ADEELCGGLWRLVLAQRWMERLKTVAGSKMQGLLERVNTEIHFVTKCAFQPPPSCLRLVQTNISRLLQETSEQLVALKPWITRQNFSRCLELQCQPDSSTLGGGSGGGSGGGSGGGTQDCSFQHSPISSDFAVKIRELSDYLLQDYPVTVASNLQYVEGGGGSPGEPSGPISTINPSPPSKESHKSPNMANCSIMIDEIIHHLKRPPNPLLDPNNLNSEDMDILMERNLRTPNLLAFVRAVKHLENASGIEAILRNLQPCLPSATAAPSRHPIIIKAGDWQEFREKLTFYLVTLEQAQEQQ

SEQ ID NO: 138 - protein, 307 aa, Unknown
  MUTAGEN 1-307: progenipoeitin protein
ADEELCGGLWRLVLAQRWMGRLKTVAGSKMQGLLERVNTEIHFVTKCAFQPPPSCLRFVQTNISRLLQETSEQLVALKPWITRQNFSRCLELQCQPDSSTLGGGSGGGSGGGSGGGSGGGSGTQDCSFQHSPISSDFAVKIRELSDYLLQDYPVTVASNLQYVEGGGGSPGEPSGPISTINPSPPSKESHKSPNMANCSIMIDEIIHHLKRPPNPLLDPNNLNSEDMDILMERNLRTPNLLAFVRAVKHLENASGIEAILRNLQPCLPSATAAPSRHPIIIKAGDWQEFREKLTFYLVTLEQAQEQQ

SEQ ID NO: 139 - protein, 302 aa, Unknown
  MUTAGEN 1-302: progenipoeitin protein
MADYPVTVASNLQDEELCGGLWRLVLAQRWMERLKTVAGSKMQGLLERVNTEIHFVTKCAFQPPPSCLRFVQTNISRLLQETSEQLVALKPWITRQNFSRCLELQCQPDSSTLGGGSGGGSGGGSGGGTQDCSFQHSPISSDFAVKIRELSDYLLQYVEGGGGSPGEPSGPISTINPSPPSKESHKSPNMANCSIMIDEIIHHLKRPPNPLLDPNNLNSEDMDILMERNLRTPNLLAFVRAVKHLENASGIEAILRNLQPCLPSATAAPSRHPIIIKAGDWQEFREKLTFYLVTLEQAQEQQ

SEQ ID NO: 140 - protein, 301 aa, Unknown
  MUTAGEN 1-301: progenipoeitin protein
AASNLQDEELCGGLWRLVLAQRWMERLKTVAGSKMQGLLERVNTEIHFVTKCAFQPPPSCLRFVQTNISRLLQETSEQLVALKPWITRQNFSRCLELQCQPDSSTLGGGSGGGSGGGSGGGTQDCSFQHSPISSDFAVKIRELSDYLLQDYPVTVYVEGGGGSPGEPSGPISTINPSPPSKESHKSPNMANCSIMIDEIIHHLKRPPNPLLDPNNLNSEDMDILMERNLRTPNLLAFVRAVKHLENASGIEAILRNLQPCLPSATAAPSRHPIIIKAGDWQEFREKLTFYLVTLEQAQEQQ

SEQ ID NO: 141 - protein, 301 aa, Unknown
  MUTAGEN 1-301: progenipoeitin protein
AVAGSKMQGLLERVNTEIHFVTKCAFQPPPSCLRFVQTNISRLLQETSEQLVALKPWITRQNFSRCLELQCQPDSSTLGGGSGGGSGGGSGGGTQDCSFQHSPISSDFAVKIRELSDYLLQDYPVTVASNLQDEELCGGLWRLVLAQRWMERLKTYVEGGGGSPGEPSGPISTINPSPPSKESHKSPNMANCSIMIDEIIHHLKRPPNPLLDPNNLNSEDMDILMERNLRTPNLLAFVRAVKHLENASGIEAILRNLQPCLPSATAAPSRHPIIIKAGDWQEFREKLTFYLVTLEQAQEQQ

SEQ ID NO: 142 - protein, 301 aa, Unknown
  MUTAGEN 1-301: progenipoeitin protein
ASKMQGLLERVNTEIHFVTKCAFQPPPSCLRFVQTNISRLLQETSEQLVALKPWITRQNFSRCLELQCQPDSSTLGGGSGGGSGGGSGGGTQDCSFQHSPISSDFAVKIRELSDYLLQDYPVTVASNLQDEELCGGLWRLVLAQRWMERLKTVAGYVEGGGGSPGEPSGPISTINPSPPSKESHKSPNMANCSIMIDEIIHHLKRPPNPLLDPNNLNSEDMDILMERNLRTPNLLAFVRAVKHLENASGIEAILRNLQPCLPSATAAPSRHPIIIKAGDWQEFREKLTFYLVTLEQAQEQQ

SEQ ID NO: 143 - protein, 301 aa, Unknown
  MUTAGEN 1-301: progenipoeitin protein
APPSCLRFVQTNISRLLQETSEQLVALKPWITRQNFSRCLELQCQPDSSTLGGGSGGGSGGGSGGGTQDCSFQHSPISSDFAVKIRELSDYLLQDYPVTVASNLQDEELCGGLWRLVLAQRWMERLKTVAGSKMQGLLERVNTEIHFVTKCAFQPYVEGGGGSPGEPSGPISTINPSPPSKESHKSPNMANCSIMIDEIIHHLKRPPNPLLDPNNLNSEDMDILMERNLRTPNLLAFVRAVKHLENASGIEAILRNLQPCLPSATAAPSRHPIIIKAGDWQEFREKLTFYLVTLEQAQEQQ

SEQ ID NO: 144 - protein, 301 aa, Unknown
  MUTAGEN 1-301: progenipoeitin protein
ATNISRLLQETSEQLVALKPWITRQNFSRCLELQCQPDSSTLGGGSGGGSGGGSGGGTQDCSFQHSPISSDFAVKIRELSDYLLQDYPVTVASNLQDEELCGGLWRLVLAQRWMERLKTVAGSKMQGLLERVNTEIHFVTKCAFQPPPSCLRFVQYVEGGGGSPGEPSGPISTINPSPPSKESHKSPNMANCSIMIDEIIHHLKRPPNPLLDPNNLNSEDMDILMERNLRTPNLLAFVRAVKHLENASGIEAILRNLQPCLPSATAAPSRHPIIIKAGDWQEFREKLTFYLVTLEQAQEQQ

SEQ ID NO: 145 - protein, 301 aa, Unknown
  MUTAGEN 1-301: progenipoeitin protein
ARFVQTNISRLLQETSEQLVALKPWITRQNFSRCLELQCQPDSSTLGGGSGGGSGGGSGGGTQDCSFQHSPISSDFAVKIRELSDYLLQDYPVTVASNLQDEELCGGLWRLVLAQRWMERLKTVAGSKMQGLLERVNTEIHFVTKCAFQPPPSCFYVEGGGGSPGEPSGPISTINPSPPSKESHKSPNMANCSIMIDEIIHHLKRPPNPLLDPNNLNSEDMDILMERNLRTPNLLAFVRAVKHLENASGIEAILRNLQPCLPSATAAPSRHPIIIKAGDWQEFREKLTFYLVTLEQAQEQQ

SEQ ID NO: 146 - protein, 307 aa, Unknown
  MUTAGEN 1-307: progenipoeitin protein
ASNLQDEELCGGLWRLVLAQRWMERLKTVAGSKMQGLLERVNTEIHFVTKCAFQPPPSCLRFVQTNISRLLQETSEQLVALKPWITRQNFSRCLELQCQPDSSTLGGGSGGGSGGGSGGGSGGGSGTQDCSFQHSPISSDFAVKIRELSDYLLQDYPVTVAYVEGGGGSPGEPSGPISTINPSPPSKESHKSPNMANCSIMIDEIIHHLKRPPNPLLDPNNLNSEDMDILMERNLRTPNLLAFVRAVKHLENASGIEAILRNLQPCLPSATAAPSRHPIIIKAGDWQEFREKLTFYLVTLEQAQEQQ

SEQ ID NO: 147 - protein, 307 aa, Unknown
  MUTAGEN 1-307: progenipoeitin protein
ANLQDEELCGGLWRLVLAQRWMERLKTVAGSKMQGLLERVNTEIHFVTKCAFQPPPSCLRFVQTNISRLLQETSEQLVALKPWITRQNFSRCLELQCQPDSSTLGGGSGGGSGGGSGGGSGGGSGTQDCSFQHSPISSDFAVKIRELSDYLLQDYPVTVASYVEGGGGSPGEPSGPISTINPSPPSKESHKSPNMANCSIMIDEIIHHLKRPPNPLLDPNNLNSEDMDILMERNLRTPNLLAFVRAVKHLENASGIEAILRNLQPCLPSATAAPSRHPIIIKAGDWQEFREKLTFYLVTLEQAQEQQ

SEQ ID NO: 148 - protein, 307 aa, Unknown
  MUTAGEN 1-307: progenipoeitin protein
ALQDEELCGGLWRLVLAQRLMERLKTVAGSKMQGLLERVNTEIHFVTKCAFQPPPSCLRFVQTNISRLLQETSEQLVALKPWITRQNFSRCLELQCQPDSSTLGGGSGGGSGGGSGGGSGGGSGTQDCSFQHSPISSDFAVKIRELSDYLLQDYPVTVASNYVEGGGGSPGEPSGPISTINPSPPSKESHKSPNMANCSIMIDEIIHHLKRPPNPLLDPNNLNSEDMDILMERNLRTPNLLAFVRAVKHLENASGIEAILRNLQPCLPSATAAPSRHPIIIKAGDWQEFREKLTFYLVTLEQAQEQQ

SEQ ID NO: 149 - protein, 307 aa, Unknown
  MUTAGEN 1-307: progenipoeitin protein
AQDEELCGGLWRLVLAQRWMERLKTVAGSKMQGLLERVNTEIHFVTKCAFQPPPSCLRFVQTNISRLLQETSEQLVALKPWITRQNFSRCLELQCQPDSSTLGGGSGGGSGGGSGGGSGGGSGTQDCSFQHSPISSDFAVKIRELSDYLLQDYPVTVASNLYVEGGGGSPGEPSGPISTINPSPPSKESHKSPNMANCSIMIDEIIHHLKRPPNPLLDPNNLNSEDMDILMERNLRTPNLLAFVRAVKHLENASGIEAILRNLQPCLPSATAAPSRHPIIIKAGDWQEFREKLTFYLVTLEQAQEQQ

SEQ ID NO: 150 - protein, 307 aa, Unknown
  MUTAGEN 1-307: progenipoeitin protein
AEELCGGLWRLVLAQRWMERLKTVAGSKMQGLLERVNTEIHFVTKCAFQPPPSCLRFVQTNISRLLQETSEQLVALKPWITRQNFSRCLELQCQPDSSTLGGGSGGGSGGGSGGGSGGGSGTQDCSFQHSPISSDFAVKIRELSDYLLQDYPVTVASNLQDYVEGGGGSPGEPSGPISTINPSPPSKESHKSPNMANCSIMIDEIIHHLKRPPNPLLDPNNLNSEDMDILMERNLRTPNLLAFVRAVKHLENASGIEAILRNLQPCLPSATAAPSRHPIIIKAGDWQEFREKLTFYLVTLEQAQEQQ

SEQ ID NO: 151 - protein, 307 aa, Unknown
  MUTAGEN 1-307: progenipoeitin protein
ALCGGLWRLVLAQRWMERLKTVAGSKMQGLLERVNTEIHFVTKCAFQPPPSCLRFVQTNISRLLQETSEQLVALKPWITRQNFSRCLELQCQPDSSTLGGGSGGGSGGGSGGGSGGGSGTQDCSFQHSPISSDFAVKIRELSDYLLQDYPVTVASNLQDEEYVEGGGGSPGEPSGPISTINPSPPSKESHKSPNMANCSIMIDEIIHHLKRPPNPLLDPNNLNSEDMDILMERNLRTPNLLAFVRAVKHLENASGIEAILRNLQPCLPSATAAPSRHPIIIKAGDWQEFREKLTFYLVTLEQAQEQQ

SEQ ID NO: 152 - protein, 307 aa, Unknown; identical to SEQ ID NO: 151
  MUTAGEN 1-307: progenipoeitin protein

SEQ ID NO: 153 - protein, 307 aa, Unknown
  MUTAGEN 1-307: progenipoeitin protein
ALCGGLWRLVLAQRWMERLKTVAGSKMQGLLERVNTEIHFVTKCAFQPPPSCLRFVQTNISRLLQETSEQLVALKPWITRQNFSRCLELQCRPDSSTLGGGSGGGSGGGSGGGSGGGSGTQDCSFQHSPISSDFAVKIRELSDYLLQDYPVTVASNLQDEEYVEGGGGSPGEPSGPISTINPSPPSKESHKSPNMANCSIMIDEIIHHLKRPPNPLLDPNNLNSEDMDILMERNLRTPNLLAFVRAVKHLENASGIEAILRNLQPCLPSATAAPSRHPIIIKAGDWQEFREKLTFYLVTLEQAQEQQ

SEQ ID NO: 154 - protein, 301 aa, Unknown; identical to SEQ ID NO: 142
  MUTAGEN 1-301: progenipoeitin protein

SEQ ID NO: 155 - protein, 315 aa, Unknown
  MUTAGEN 1-315: progenipoeitin protein
AQDDELCGGLWRLVLAQRWMERLKTVAGSKMQGLLERVNTEIHFVTKCAFQPPPSCLRFVQTNISRLLQETSEQLVALKPWITRQNFSRCLELQCQPDSSTLGGGSGGGSGGGSGGGSGGGSGGGSGGGSGTQDCSFQHSPISSDFAVKIRELSDYLLQDYPVTVASNLYVEGGGGSPGEPSGPISTINPSPPSKESHKSPNMANCSIMIDEIIHHLKRPPNPLLDPNNLNSEDMDILMERNLRTPNLLAFVRAVKHLENASGIEAILRNLQPCLPSATAAPSRHPIIIKAGDWQEFREKLTFYLVTLEQAQEQQ

SEQ ID NO: 156 - protein, 301 aa, Unknown
  MUTAGEN 1-301: progenipoeitin protein
AQDEELCGGLWRLVLAQRWMERLKTVAGSKMQGLLERVNTEIHFVTKCAFQPPPSCLRFVQTNISRLLQETSEQLVALKPWITRQNFSRCLELQCQPDSSTLPPPWSPRPLGATAPTTQDCSFQHSPISSDFAVKIRELSDYLLQDYPVTVASNLYVEGGGGSPGEPSGPISTINPSPPSKESHKSPNMANCSIMIDEIIHHLKRPPNPLLDPNNLNSEDMDILMERNLRTPNLLAFVRAVKHLENASGIEAILRNLQPCLPSATAAPSRHPIIIKAGDWQEFREKLTFYLVTLEQAQEQQ

SEQ ID NO: 157 - protein, 307 aa, Unknown
  MUTAGEN 1-307: progenipoeitin protein
AQDEELCGGLWRLVLAQRWMERLKTVAGSKMQGLLERVNTEIHFVTKCAFQPPPSCLRFVQTNISRLLQETSEQLVALKPWITRQNFSRCLELQCQPDSSTLPPPWSPRPLGATAPTAGQPPLTQDCSFQHSPISSDFAVKIRELSDYLLQDYPVTVASNLYVEGGGGSPGEPSGPISTINPSPPSKESHKSPNMANCSIMIDEIIHHLKRPPNPLLDPNNLNSEDMDILMERNLRTPNLLAFVRAVKHLENASGIEAILRNLQPCLPSATAAPSRHPIIIKAGDWQEFREKLTFYLVTLEQAQEQQ

SEQ ID NO: 158 - protein, 370 aa, Unknown
  MUTAGEN 1-370: progenipoeitin protein
ATPLGPASSLPQSFLLKSLEQVRKIQGDGAALQEKLCATYKLCHPEELVLLGHSLGIPWAPLSSCPSQALQLAGCLSQLHSGLFLYQGLLQALEGISPELGPTLDTLQLDVADFATTIWQQMEELGMAPALQPTQGAMPAFASAFQRRAGGVLVASHLQSFLEVSYRVLRHLAQPYVEGGGGSPGEPSGPISTINPSPPSKESHKSPNMADEELCGGLWRLVLAQRWMERLKTVAGSKMQGLLERVNTEIHFVTKCAFQPPPSCLRFVQTNISRLLQETSEQLVALKPWITRQNFSRCLELQCQPDSSTLGGGSGGGSGGGSGGGSGGGSGTQDCSFQHSPISSDFAVKIRELSDYLLQDYPVTVASNLQ

SEQ ID NO: 159 - protein, 370 aa, Unknown
  MUTAGEN 1-370: progenipoeitin protein
ATPLGPASSLPQSFLLKSLEQVRKIQGDGAALQEKLCATYKLCHPEELVLLGHSLGIPWAPLSSCPSQALQLAGCLSQLHSGLFLYQGLLQALEGISPELGPTLDTLQLDVADFATTIWQQMEELGMAPALQPTQGAMPAFASAFQRRAGGVLVASHLQSFLEVSYRVLRHLAQPYVEGGGGSPGEPSGPISTINPSPPSKESHKSPNMANLQDEELCGGLWRLVLAQRWMERLKTVAGSKMQGLLERVNTEIHFVTKCAFQPPPSCLRFVQINISRLLQETSEQLVALKPWITRQNFSRCLELQCQPDSSTLGGGSGGGSGGGSGGGSGGGSGTQDCSFQHSPISSDFAVKIRELSDYLLQDYPVTVAS

SEQ ID NO: 160 - protein, 370 aa, Unknown
  MUTAGEN 1-370: progenipoeitin protein
ATPLGPASSLPQSFLLKSLEQVRKIQGDGAALQEKLCATYKLCHPEELVLLGHSLGIPWAPLSSCPSQALQLAGCLSQLHSGLFLYQGLLQALEGISPELGPTLDTLQLDVADFATTIWQQMEELGMAPALQPTQGAMPAFASAFQRRAGGVLVASHLQSFLEVSYRVLRHLAQPYVEGGGGSPGEPSGPISTINPSPPSKESHKSPNMAPPSCLRFVQTNISRLLQETSEQLVALKPWITRQNFSRCLELQCQPDSSTLGGGSGGGSGGGSGGGSGGGSGTQDCSFQHSPISSDFAVKIRELSDYLLQDYPVTVASNLQDEELCGGLWRLVLAQRWMERLKTVAGSKMQGLLERVNTEIHFVTKCAFQP

SEQ ID NO: 161 - protein, 370 aa, Unknown
  MUTAGEN 1-370: progenipoeitin protein
ATPLGPASSLPQSFLLKSLEQVRKIQGDGAALQEKLCATYKLCHPEELVLLGHSLGIPWAPLSSCPSQALQLAGCLSQLHSGLFLYQGLLQALEGISPELGPTLDTLQLDVADFATTIWQQMEELGMAPALQPTQGAMPAFASAFQRRAGGVLVASHLQSFLEVSYRVLRHLAQPYVEGGGGSPGEPSGPISTINPSPPSKESHKSPNMALQDEELCGGLWRLVLAQRWMERLKTVAGSKMQGLLERVNTEIHFVTKCAFQPPPSCLRFVQTNISRLLQETSEQLVALKPWITRQNFSRCLELQCQPDSSTLGGGSGGGSGGGSGGGSGGGSGTQDCSFQHSPISSDFAVKIRELSDYLLQDYPVTVASN

SEQ ID NO: 162 - protein, 370 aa, Unknown
  MUTAGEN 1-370: progenipoeitin protein
ATPLGPASSLPQSFLLKSLEQVRKIQGDGAALQEKLCATYKLCHPEELVLLGHSLGIPWAPLSSCPSQALQLAGCLSQLHSGLFLYQGLLQALEGISPELGPTLDTLQLDVADFATTIWQQMEELGMAPALQPTQGAMPAFASAFQRRAGGVLVASHLQSFLEVSYRVLRHLAQPYVEGGGGSPGEPSGPISTINPSPPSKESHKSPNMAQDEELCGGLWRLVLAQRWMERLKTVAGSKMQGLLERVNTEIHFVTKCAFQPPPSCLRFVQTNISRLLQETSEQLVALKPWITRQNFSRCLELQCQPDSSTLGGGSGGGSGGGSGGGSGGGSGTQDCSFQHSPISSDFAVKIRELSDYLLQDYPVTVASNL

SEQ ID NO: 163 - protein, 370 aa, Unknown
  MUTAGEN 1-370: progenipoeitin protein
ATPLGPASSLPQSFLLKSLEQVRKIQGDGAALQEKLCATYKLCHPEELVLLGHSLGIPWAPLSSCPSQALQLAGCLSQLHSGLFLYQGLLQALEGISPELGPTLDTLQLDVADFATTIWQQMEELGMAPALQPTQGAMPAFASAFQRRAGGVLVASHLQSFLEVSYRVLRHLAQPYVEGGGGSPGEPSGPISTINPSPPSKESHKSPNMAEELCGGLWRLVLAQRWMERLKTVAGSKMQGLLERVNTEIHFVTKCAFQPPPSCLRFVQTNISRLLQETSEQLVALKPWITRQNFSRCLELQCQPDSSTLGGGSGGGSGGGSGGGSGGGSGTQDCSFQHSPISSDFAVKIRELSDYLLQDYPVTVASNLQD

SEQ ID NO: 164 - protein, 370 aa, Unknown
  MUTAGEN 1-370: progenipoeitin protein
ATPLGPASSLPQSFLLKSLEQVRKIQGDGAALQEKLCATYKLCHPEELVLLGHSLGIPWAPLSSCPSQALQLAGCLSQLHSGLFLYQGLLQALEGISPELGPTLDTLQLDVADFATTIWQQMEELGMAPALQPTQGAMPAFASAFQRRAGGVLVASHLQSFLEVSYRVLRHLAQPYVEGGGGSPGEPSGPISTINPSPPSKESHKSPNMAELCGGLWRLVLAQRWMERLKTVAGSKMQGLLERVNTEIHFVTKCAFQPPPSCLRFVQTNISRLLQETSEQLVALKPWITRQNFSRCLELQCQPDSSTLGGGSGGGSGGGSGGGSGGGSGTQDCSFQHSPISSDFAVKIRELSDYLLQDYPVTVASNLQDE

SEQ ID NO: 165 - protein, 370 aa, Unknown
  MUTAGEN 1-370: progenipoeitin protein
ATPLGPASSLPQSFLLKSLEQVRKIQGDGAALQEKLCATYKLCHPEELVLLGHSLGIPWAPLSSCPSQALQLAGCLSQLHSGLFLYQGLLQALEGISPELGPTLDTLQLDVADFATTIWQQMEELGMAPALQPTQGAMPAFASAFQRRAGGVLVASHLQSFLEVSYRVLRHLAQPYVEGGGGSPGEPSGPISTINPSPPSKESHKSPNMALCGGLWRLVLAQRWMERLKTVAGSKMQGLLERVNTEIHFVTKCAFQPPPSCLRFVQTNISRLLQETSEQLVALKPWITRQNFSRCLELQCQPDSSTLGGGSGGGSGGGSGGGSGGGSGTQDCSFQHSPISSDFAVKIRELSDYLLQDYPVTVASNLQDEE

SEQ ID NO: 166 - protein, 364 aa, Unknown
  MUTAGEN 1-364: progenipoeitin protein
ATPLGPASSLPQSFLLKSLEQVRKIQGDGAALQEKLCATYKLCHPEELVLLGHSLGIPWAPLSSCPSQALQLAGCLSQLHSGLFLYQGLLQALEGISPELGPTLDTLQLDVADFATTIWQQMEELGMAPALQPTQGAMPAFASAFQRRAGGVLVASHLQSFLEVSYRVLRHLAQPYVEGGGGSPGEPSGPISTINPSPPSKESHKSPNMADEELCGGLWRLVLAQRWMERLKTVAGSKMQGLLERVNTEIHFVTKCAFQPPPSCLRFVQTNISRLLQETSEQLVALKPWITRQNFSRCLELQCQPDSSTLPPPWSPRPLGATAPTTQDCSFQHSPISSDFAVKIRELSDYLLQDYPVTVASNLQ

SEQ ID NO: 167 - protein, 378 aa, Unknown
  MUTAGEN 1-378: progenipoeitin protein
ATPLGPASSLPQSFLLKSLEQVRKIQGDGAALQEKLCATYKLCHPEELVLLGHSLGIPWAPLSSCPSQALQLAGCLSQLHSGLFLYQGLLQALEGISPELGPTLDTLQLDVADFATTIWQQMEELGMAPALQPTQGAMPAFASAFQRRAGGVLVASHLQSFLEVSYRVLRHLAQPYVEGGGGSPGEPSGPISTINPSPPSKESHKSPNMADEELCGGLWRLVLAQRWMERLKTVAGSKMQGLLERVNTEIHFVTKCAFQPPPSCLRFVQTNISRLLQETSEQLVALKPWITRQNFSRCLELQCQPDSSTLGGGSGGGSGGGSGGGSGGGSGGGSGGGSGTQDCSFQHSPISSDFAVKIRELSDYLLQDYPVTVASNLQ

SEQ ID NO: 168 - protein, 370 aa, Unknown
  MUTAGEN 1-370: progenipoeitin protein
ATPLGPASSLPQSFLLKSLEQVRKIQGDGAALQEKLCATYKLCHPEELVLLGHSLGIPWAPLSSCPSQALQLAGCLSQLHSGLFLYQGLLQALEGISPELGPTLDTLQLDVADFATTIWQQMEELGMAPALQPTQGAMPAFASAFQRRAGGVLVASHLQSFLEVSYRVLRHLAQPYVEGGGGSPGEPSGPISTINPSPPSKESHKSPNMADEELCGGLWRLVLAQRWMERLKTVAGSKMQGLLERVNTEIHFVTKCAFQPPPSCLRFVQTNISRLLQETSEQLVALKPWITRQNFSRCLELQCQPDSSTLPPPWSPRPLGATAPTAGQPPLTQDCSFQHSPISSDFAVKIRELSDYLLQDYPVTVASNLQ

SEQ ID NO: 169 - protein, 155 aa, Unknown
  MUTAGEN 1-155: modified mammalian flt-3 ligand
ADYPVTVASNLQDEELCGGLWRLVLAQRWMERLKTVAGSKMQGLLERVNTEIHFVTKCAFQPPPSCLRFVQTNISRLLQETSEQLVALKPWITRQNFSRCLELQCQPDSSTLGGGSGGGSGGGSGGGTQDCSFQHSPISSDFAVKIRELSDYLLQ

SEQ ID NO: 170 - protein, 155 aa, Unknown
  MUTAGEN 1-155: modified mammalian flt-3 ligand
AASNLQDEELCGGLWRLVLAQRWMERLKTVAGSKMQGLLERVNTEIHFVTKCAFQPPPSCLRFVQTNISRLLQETSEQLVALKPWITRQNFSRCLELQCQPDSSTLGGGSGGGSGGGSGGGTQDCSFQHSPISSDFAVKIRELSDYLLQDYPVTV

SEQ ID NO: 171 - protein, 155 aa, Unknown
  MUTAGEN 1-155: modified mammalian flt-3 ligand
AVAGSKMQGLLERVNTEIHFVTKCAFQPPPSCLRFVQTNISRLLQETSEQLVALKPWITRQNFSRCLELQCQPDSSTLGGGSGGGSGGGSGGGTQDCSFQHSPISSDFAVKIRELSDYLLQDYPVTVASNLQDEELCGGLWRLVLAQRWMERLKT

SEQ ID NO: 172 - protein, 155 aa, Unknown
  MUTAGEN 1-155: modified mammalian flt-3 ligand
ASKMQGLLERVNTEIHFVTKCAFQPPPSCLRFVQTNISRLLQETSEQLVALKPWITRQNFSRCLELQCQPDSSTLGGGSGGGSGGGSGGGTQDCSFQHSPISSDFAVKIRELSDYLLQDYPVTVASNLQDEELCGGLWRLVLAQRWMERLKTVAG

SEQ ID NO: 173 - protein, 155 aa, Unknown
  MUTAGEN 1-155: modified mammalian flt-3 ligand
APPSCLRFVQTNISRLLQETSEQLVALKPWITRQNFSRCLELQCQPDSSTLGGGSGGGSGGGSGGGTQDCSFQHSPISSDFAVKIRELSDYLLQDYPVTVASNLQDEELCGGLWRLVLAQRWMERLKTVAGSKMQGLLERVNTEIHFVTKCAFQP

SEQ ID NO: 174 - protein, 155 aa, Unknown
  MUTAGEN 1-155: modified mammalian flt-3 ligand
ARFVQTNISRLLQETSEQLVALKPWITRQNFSRCLELQCQPDSSTLGGGSGGGSGGGSGGGTQDCSFQHSPISSDFAVKIRELSDYLLQDYPVTVASNLQDEELCGGLWRLVLAQRWMERLKTVAGSKMQGLLERVNTEIHFVTKCAFQPPPSCL

SEQ ID NO: 175 - protein, 155 aa, Unknown
  MUTAGEN 1-155: modified mammalian flt-3 ligand
ATNISRLLQETSEQLVALKPWITRQNFSRCLELQCQPDSSTLGGGSGGGSGGGSGGGTQDCSFQHSPISSDFAVKIRELSDYLLQDYPVTVASNLQDEELCGGLWRLVLAQRWMERLKTVAGSKMQGLLERVNTEIHFVTKCAFQPPPSCLRFVQ

SEQ ID NO: 176 - protein, 370 aa, Unknown
  MUTAGEN 1-370: progenipoeitin protein
ADEELCGGLWRLVLAQRWMERLKTVAGSKMQGLLERVNTEIHFVTKCAFQPPPSCLRFVQTNISRLLQETSEQLVALKPWITRQNFSRCLELQCQPDSSTLGGGSGGGSGGGSGGGSGGGSGTQDCSFQHSPISSDFAVKIRELSDYLLQDYPVTVASNLQYVEGGGGSPGEPSGPISTINPSPPSKESHKSPNMATPLGPASSLPQSFLLKSLEQVRKIQGDGAALQEKLCATYKLCHPEELVLLGHSLGIPWAPLSSCPSQALQLAGCLSQLHSGLFLYQGLLQALEGISPELGPTLDTLQLDVADFATTIWQQMEELGMAPALQPTQGAMPAFASAFQRRAGGVLVASHLQSFLEVSYRVLRHLAQP

SEQ ID NO: 177 - protein, 370 aa, Unknown
  MUTAGEN 1-370: progenipoeitin protein
ADEELCGGLWRLVLAQRWMERLKTVAGSKMQGLLERVNTEIHFVTKCAFQPPPSCLRFVQTNISRLLQETSEQLVALKPWITRQNFSRCLELQCQPDSSTLGGGSGGGSGGGSGGGSGGGSGTQDCSFQHSPISSDFAVKIRELSDYLLQDYPVTVASNLQYVEGGGGSPGEPSGPISTINPSPPSKESHKSPNMATPLGPASSLPQSFLLKCLEQVRKIQGDGAALQEKLCATYKLCHPEELVLLGHSLGIPWAPLSSCPSQALQLAGCLSQLHSGLFLYQGLLQALEGISPELGPTLDTLQLDVADFATTIWQQMEELGMAPALQPTQGAMPAFASAFQRRAGGVLVASHLQSFLEVSYRVLRHLAQP

SEQ ID NO: 178 - protein, 354 aa, Unknown
  MUTAGEN 1-354: progenipoeitin protein
ADEELCGGLWRLVLAQRWMERLKTVAGSKMQGLLERVNTEIHFVTKCAFQPPPSCLRFVQTNISRLLQETSEQLVALKPWITRQNFSRCLELQCQPDSSTLPPPWSPRPLGATAPTAGQPPLTQDCSFQHSPISSDFAVKIRELSDYLLQDYPVTVASNLYVEGGGGSPGGGSGGGSNMATPLGPASSLPQSFLLKSLEQVRKIQGDGAALQEKLCATYKLCHPEELVLLGHSLGIPWAPLSSCPSQALQLAGCLSQLHSGLFLYQGLLQALEGISPELGPTLDTLQLDVADFATTIWQQMEELGMAPALQPTQGAMPAFASAFQRRAGGVLVASHLQSFLEVSYRVLRHLAQP

SEQ ID NO: 179 - protein, 363 aa, Unknown
  MUTAGEN 1-363: progenipoeitin protein
ADEELCGGLWRLVLAQRWMERLKTVAGSKMQGLLERVNTEIHFVTKCAFQPPPSCLRFVQTNISRLLQETSEQLVALKPWITRQNFSRCLELQCQPDSSTLGGGSGGGSGGGSGGGSGGGSGGGSGGGSGTQDCSFQHSPISSDFAVKIRELSDYLLQDYPVTVASNLQYVEGGGGSPGGGSGGGSNMATPLGPASSLPQSFLLKSLEQVRKIQGDGAALQEKLCATYKLCHPEELVLLGHSLGIPWAPLSSCPSQALQLAGCLSQLHSGLFLYQGLLQALEGISPELGPTLDTLQLDVADFATTIWQQMEELGMAPALQPTQGAMPAFASAFQRRAGGVLVASHLQSFLEVSYRVLRHLAQP

SEQ ID NO: 180 - protein, 348 aa, Unknown
  MUTAGEN 1-348: progenipoeitin protein
ADEELCGGLWRLVLAQRWMERLKTVAGSKMQGLLERVNTEIHFVTKCAFQPPPSCLRFVQTNISRLLQETSEQLVALKPWITRQNFSRCLELQCQPDSSTLPPPWSPRPLGATAPTTQDCSFQHSPISSDFAVKIRELSDYLLQDYPVTVASNLYVEGGGGSPGGGSGGGSNMATPLGPASSLPQSFLLKSLEQVRKIQGDGAALQEKLCATYKLCHPEELVLLGHSLGIPWAPLSSCPSQALQLAGCLSQLHSGLFLYQGLLQALEGISPELGPTLDTLQLDVADFATTIWQQMEELGMAPALQPTQGAMPAFASAFQRRAGGVLVASHLQSFLEVSYRVLRHLAQP

SEQ ID NO: 181 - protein, 359 aa, Unknown
  MUTAGEN 1-359: progenipoeitin protein
ADEELCGGLWRLVLAQRWMERLKTVAGSKMQGLLERVNTEIHFVTKCAFQPPPSCLRFVQTNISRLLQETSEQLVALRPWITRQNFSRCLELQCQPDSSTLGGGSGGGSGGTQDCSFQHSPISSDFAVKIRELSDYLLQDYPVTVASNLQYVEGGGGSPGEPSGPISTINPSPPSKESHKSPNMATPLGPASSLPQSFLLKCLEQVRKIQGDGAALQEKLCATYKLCHPEELVLLGHSLGIPWAPLSSCPSQALQLAGCLSQLHSGLFLYQGLLQALEGISPELGPTLDTLQLDVADFATTIWQQMEELGMAPALQPTQGAMPAFASAFQRRAGGVLVASHLQSFLEVSYRVLRHLAQP

SEQ ID NO: 182 - protein, 364 aa, Unknown
  MUTAGEN 1-364: progenipoeitin protein
ADEELCGGLWRLVLAQRWMERLKTVAGSKMQGLLERVNTEIHFVTKCAFQPPPSCLRFVQTNISRLLQETSEQLVALKPWITRQNFSRCLELQCQPDSSTLGGGSGGGSGGGSGGGTQDCSFQHSPISSDFAVKIRELSDYLLQDYPVTVASNLQYVEGGGGSPGEPSGPISTINPSPPSKESHKSPNMATPLGPASSLPQSFLLKCLEQVRKIQGDGAALQEKLCATYKLCHPEELVLLGHSLGIPWAPLSSCPSQALQLAGCLSQLHSGLFLYQGLLQALEGISPELGPTLDTLQLDVADFATTIWQQMEELGMAPALQPTQGAMPAFASAFQRRAGGVLVASHLQSFLEVSYRVLRHLAQP

SEQ ID NO: 183 - protein, 370 aa, Unknown
  MUTAGEN 1-370: progenipoeitin protein
ADEELCGGLWRLVLAQRWMERLKTVAGSKMQGLLERVNTEIHFVTKCAFQPPPSCLRFVQTNISRLLQETSEQLVALKPWITRQNFSRCLELQCQPDSSTLGGGSGGGSGGGSGGGSGGGSGTQDCSFQHSPISSDFAVKIRELSDYLLQDYPVTVASNLQYVEGGGGSPGEPSGPISTINPSPPSKESHKSPNMATPLGPASSLPQSFLLKCLEQVRKIQGDGAALQEKLCATYKLCHPEELVLLGHSLGIPWAPLSSCPSQALQLAGCLSQLHSGLFLYQGLLQALEGISPELGPTLDTLQLDVADFATTIWQQMEELGMAPALQPTQGAMPAFASAFQRRAGGVLVASHLQSFLEVSYRVVRHLAQP

SEQ ID NO: 184 - protein, 364 aa, Unknown
  MUTAGEN 1-364: progenipoeitin protein
APPSCLRFVQTNISRLLQETSEQLVALKPWITRQNFSRCLELQCQPDSSTLGGGSGGGSGGGSGGGTQDCSFQHSPISSDFAVKIRELSDYLLQDYPVTVASNLQDEELCGGLWRLVLAQRWMERLKTVAGSKMQGLLERVNTEIHFVTKCAFQPYVEGGGGSPGEPSGPISTINPSPPSKESHKSPNMATPLGPASSVPQSFLLKCLEQVRKIQGDGAALQEKLCATYKLCHPEELVLLGHSLGIPWAPLSSCPSQALQLAGCLSQLHSGLFLYQGLLQALEGISPELGPTLDTLQLDVADFATTIWQQMEELGMAPALQPTQGAMPAFASAFQRRAGGVLVASHLQSFLEVSYRVIRHLAQP

SEQ ID NO: 185 - protein, 370 aa, Unknown
  MUTAGEN 1-370: progenipoeitin protein
ASNLQDEELCGGLWRLVLAQRWMERLKTVAGSKMQGLLERVNTEIHFVTKCAFQPPPSCLRFVQTNISRLLQETSEQLVALKPWITRQNFSRCLELQCQPDSSTLGGGSGGGSGGGSGGGSGGGSGTQDCSFQHSPISSDFAVKIRELSDYLLQDYPVTVAYVEGGGGSPGEPSGPISTINPSHPSKESHKSPNMATPLGPASSLPQSFLLKCLEQVRKIQGDGAALQEKLCATYKLCHPEELVLLGHSLGIPWAPLSSCPSQALQLAGCLSQLHSGLFLYQGLLQALEGISPELGPTLDTLQLDVADFATTIWQQMEELGMAPALQPTQGAMPAFASAFQRRAGGVLVASHLQSFLEVSYRVLRHLAQP

SEQ ID NO: 186 - protein, 370 aa, Unknown
  MUTAGEN 1-370: progenipoeitin protein
ANLQDEELCGGLWRLVLAQRWMERLKTVAGSKMQGLLERVNTEIHFVTKCAFQPPPSCLRFVQTNISRLLQETSEQLVALKPWITRQNFSRCLELQCQPDSSTLGGGSGGGSGGGSGGGSGGGSGTQDCSFQHSPISSDFAVKIRELSDYLLQDYPVTVASYVEGGGGSPGEPSGPISTINPSPPSKESHKSPNMATPLGPASSLPQSFLLKCLEQVRKIQGDGAALQEKLCATYKLCHPEELVLLGHSLGIPWAPLSSCPSQALQLAGCLSQLHSGLFLYQGLLQALEGISPELGPTLDTLQLDVADFATTIWQQMEELGMAPALQPTQGAMPAFASAFQRRAGGVLVASHLQSFLEVSYRVIRHLAQP

SEQ ID NO: 187 - protein, 370 aa, Unknown
  MUTAGEN 1-370: progenipoeitin protein
ALQDEELCGGLWRLVLAQRLMERLKTVAGSKMQGLLERVNTEIHFVTKCAFQPPPSCLRFVQTNISRLLQETSEQLVALKPWITRQNFSRCLELQCQPDSSTLGGGSGGGSGGGSGGGSGGGSGTQDCSFQHSPISSDFAVKIRELSDYLLQDYPVTVASNYVEGGGGSPGEPSGPISTINPSPPSKESHKSPNMATPLGPASSLPQSFLLKCLEQVRKIQGDGAALQEKLCATYKLCHPEELVLLGHSLGIPWAPLSSCPSQALQLAGCLSQLHSGLFLYQGLLQALEGISPELGPTLDTLQLDVADFATTIWQQMEELGMAPALQPTQGAMPAFASAFQRRAGGVLVASHLQSFLEVSYRVLRHLAQP

SEQ ID NO: 188 - protein, 370 aa, Unknown
  MUTAGEN 1-370: progenipoeitin protein
ALCGGLWRLVLAQRWMERLKTVAGSKMQGLLERVNTEIHFVTKCAFQPPPSCLRFVQTNISRLLQETSEQLVALKPWITRQNFSRCLELQCQPDSSTLGGGSGGGSGGGSGGGSGGGSGTQDCSFQHSPISSDFAVKIRELSDYLLQDYPVTVASNLQDEEYVEGGGGSPGEPSGPISTINPSPPSKESHKSPNMATPLGPASSLPQSFLLKCLEQVRKIQGDGAALQEKLCATYKLCHPEELVLLGHSLGIPWAPLSSCPSQALQLAGCLSQLHSGLFLYQGLLQALEGISPELGPTLDTLQLDVADFATTIWQQMEELGMAPALQPTQGAMPAFASAFQRRAGGVLVASHLQSFLEVSYRVLRHLAQP

SEQ ID NO: 189 - protein, 364 aa, Unknown
  MUTAGEN 1-364: progenipoeitin protein
ASKMQGLLERVNTEIHFVTKCAFQPPPSCLRFVQTNISRLLQETSEQLVALKPWITRQNFSRCLELQCQPDSSTLGGGSGGGSGGGSGGGTQDCSFQHSPISSDFAVKIRELSDYLLQDYPVTVASNLQDEELCGGLWRLVLAQRWMERLKTVAGYVEGGGGSPGEPSGPISTINPSPPSKESHKSPNMATPLGPASSLPQSFLLKCLEQVRKIQGDGAALQEKLCATYKLCHPEELVLLGHSLGIPWAPLSSCPSQALQLAGCLSQLHSGLFLYQGLLQALEGISPELGPTLDTLQLDVADFATTIWQQMEELGMAPALQPTQGAMPAFASAFQRRAGGVLVASHLQSFLEVSYRVLRHLAQP

SEQ ID NO: 190 - protein, 364 aa, Unknown; identical to SEQ ID NO: 189
  MUTAGEN 1-364: progenipoeitin protein

SEQ ID NO: 191 - protein, 370 aa, Unknown
  MUTAGEN 1-370: progenipoeitin protein
ALCGGLWRLVLAQRWMERLKTVAGSKMQGLLERVNTEIHFVTKCAFQPPPSCLRFVQTNISRLLQETSEQLVALKPWITRQNFSRCLELQCRPDSSTLGGGSGGGSGGGSGGGSGGGSGTQDCSFQHSPISSNFAVKIRELSDYLLQDYPVTVASNLQDEEYVEGGGGSPGEPSGPIFTINPSPPSKESHKSPNMATPLGPASSLPQSFLLKCLEQVRKIQGDGAALQEKLCATYKLCHPEELVLLGHSLGIPWAPLSSCPSQALQLAGCLSQLHSGLFLYQGLLQALEGISPELGPTLDTLQLDVADFATTIWQQMEELGMAPALQPTQGAMPAFASAFQRRAGGVLVASHLQSFLEVSYRVLRHLAQP

SEQ ID NO: 192 - protein, 370 aa, Unknown
  MUTAGEN 1-370: progenipoeitin protein
AELCGGLWRLVLAQRWMERLKTVAGSKMQGLLERVNTEIHFVTKCAFQPPPSCLRFVQTNISRLLQETSEQLVALKPWITRQNFSRCLELQCQPDSSTLGGGSGGGSGGGSGGGSGGGSGTQDCSFQHSPISSDFAVKIRELSDYLLQDYPVTVASNLQDEYVEGGGGSPGEPSGPISTINPSPPSKESHKSPNMATPLGPASSLPQSFLLKCLEQVRKIQGDGAALQEKLCATYKLCHPEELVLLGHSLGIPWAPLSSCPSQALQLAGCLSQLHSGLFLYQGLLQALEGISPELGPTLDTLQLDVADFATTIWQQMEELGMAPALQPTQGAMPAFASAFQRRAGGVLVASHLQSFLEVSYRVLRHLAQP

SEQ ID NO: 193 - protein, 370 aa, Unknown
  MUTAGEN 1-370: progenipoeitin protein
AEELCGGLWRLVLAQRWMERLKTVAGSKMQGLLERVNTEIHFVTKCAFQPPPSCLRFVQTNISRLLQETSEQLVALKPWITRQNFSRCLELQCQPDSSTLGGGSGGGSGGGSGGGSGGGSGTQDCSFQHSPISSDFAVKIRELSDYLLQDYPVTVASNLQDYVEGGGGSPGEPSGPISTINPSPPSKESHKSPNMATPLGPASSLPQSFLLKCLEQVRKIQGDGAALQEKLCATYKLCHPEELVLLGHSLGIPWAPLSSCPSQALQLAGCLSQLHSGLFLYQGLLQALEGISPELGPTLDTLQLDVADFATTIWQQMEELGMAPALQPTQGAMPAFASAFQRRAGGVLVASHLQSFLEVSYRVLRHLAQP

SEQ ID NO: 194 - protein, 370 aa, Unknown
  MUTAGEN 1-370: progenipoeitin protein
AQDEELCGGLWRLVLAQRWMERLKTVAGSKMQGLLERVNTEIHFVTKCAFQPPPSCLRFVQTNISRLLQETSEQLVALKPWITRQNFSRCLELQCQPDSSTLGGGSGGGSGGGSGGGSGGGSGTQDCSFQHSPISSDFAVKIRELSDYLLQDYPVTVASNLYVEGGGGSPGEPSGPISTINPSPPSKESHKSPNMATPLGPASSLPQSFLLKCLEQVRKIQGDGAALQEKLCATYKLCHPEELVLLGHSLGIPWAPLSSCPSQALQLAGCLSQLHSGLFLYQGLLQALEGISPELGPTLDTLQLDVADFATTIWQQMEELGMAPALQPTQGAMPAFASAFQRRAGGVLVASHLQSFLEVSYRVLRHLAQP

SEQ ID NO: 195 - protein, 364 aa, Unknown
  MUTAGEN 1-364: progenipoeitin protein
ATNISRLLQETSEQLVALKPWITRQNFSRCLELQCQPDSSTLGGGSGGGSGGGSGGGTQDCSFQHSPISSDFAVKIRELSDYLLQDYPVTVASNLQDEELCGGLWRLVLAQRWMERLKTVAGSKMQGLLERVNTEIHFVTKCAFQPPPSCLRFVQYVEGGGGSPGEPSGPISTINPSPPSKESHKSPNMATPLGPASSLPQSFLLKCLEQVRKIQGDGAALQEKLCATYKLCHPEELVLLGHSLGIPWAPLSSCPSQALQLAGCLSQLHSGLFLYQGLLQALEGISPELGPTLDTLQLDVADFATTIWQQMEELGMAPALQPTQGAMPAFASAFQRRAGGVLVASHLQSFLEVSYRVLRHLAQP

SEQ ID NO: 196 - protein, 355 aa, Unknown
  MUTAGEN 1-355: progenipoeitin protein
ADEELCGGLWRLVLAQRWMERLKTVAGSKMQGLLERVNTEIHFVTKCAFQPPPSCLRFVQTNISRLLQETSEQLVALKPWITRQNFSRCLELQCQPDSSTLGGGSGGGSGGGSGGGSGGGSGTQDCSFQHSPISSDFAVKIRELSDYLLQDYPVTVASNLQYVEGGGGSPGGGSGGGSNMATPLGPASSLPQSFLLKSLEQVRKIQGDGAALQEKLCATYKLCHPEELVLLGHSLGIPWAPLSSCPSQALQLAGCLSQLHSGLFLYQGLLQALEGISPELGPTLDTLQLDVADFATTIWQQMEELGMAPALQPTQGAMPAFASAFQRRAGGVLVASHLQSFLEVSYRVLRHLAQP

SEQ ID NO: 197 - protein, 370 aa, Unknown
  MUTAGEN 1-370: progenipoeitin protein
AQDEELCGGLWRLVLAQRWMERLKTVAGSKMQGLLERVNTEIHFVTKCAFQPPPSCLRFVQTNISRLLQETSEQLVALKPWITRQNFSRCLELQCQPDSSTLGGGSGGGSGGGSGGGSGGGSGTQDCSFQHSPISSDSAVKIRELSDYLLQDYPVTVASNLYVEGGGGSPGEPSGPISTINPSPPSKESHKSPNMATPLGPASSLPQSFLLKCLEQVRKIQGDGAALQEKLCATYKLCHPEELVLLGHSLGIPWAPLSSCPSQALQLAGCLSQLHSGLFLYQGLLQALEGISPELGPTLDTLQLDVADFATTIWQQMEELGMAPALQPTQGAMPAFASAFQRRAGGVLVASHLQSFLEVSYRVLRHLAQP

SEQ ID NO: 198 - protein, 366 aa, Unknown
  MUTAGEN 1-366: progenipoeitin protein
ALCGGLWRLVLAQRWMERLKTVAGSKMQGLLERVNTEIHFVTKYAFQPPPSCLRFVQTNISRLLQETSEQLVALKPWITRQNFSRCLELQCRPDSSTLGGGSGGGSGGGSGGGSGTQDCSFQHSPISSDFAVKIRELSDYLLQDYPVTVASNLQDEEYVEGGGGSPGEPSGPISTINPSPPSKESHKSPNMATPLGPASSLPQSFLLKCLEQVRKIQGDGAALQEKLCATYKLCHPEELVLLGHSLGIPWAPLSSCPSQALQLAGCLSQLHSGLFLYQGLLQALEGISPELGPTLDTLQLDVADFATTIWQQMEELGMAPALQPTQGAMPAFASAFQRRAGGVLVASHLQSFLEVSYRVLRHLAQP

SEQ ID NO: 199 - protein, 364 aa, Unknown
  MUTAGEN 1-364: progenipoeitin protein
ASKMQGLLERVNTEIHFVTKCAFQPPPSCLRFVQTNISRLLQETSEQLVALKPWITRQNFFRCLELQCQPDSSTLGGGSGGGSGGGSGGGTQDCSFQHSPISSDFAVKIRELSDYLLQDYPVTVASNLQDEELCGGLWRLVLAQRWMERLKTVAGYVEGGGGSPGEPSGPISTINPSPPSKESHKSPNMATPLGPASSLPQSFLLKCLEQVRKIQGDGAALQEKLCATYKLCHPEELVLLGHSLGIPWAPLSSCPSQALQLAGCLSQLHSGLFLYQGLLQALEGISPELGPTLDTLQLDVADFATTIWQQMEELGMAPALQPTQGAMPAFASAFQRRAGGVLVASHLQSFLEVSYRVLRHLAQP

SEQ ID NO: 200 - protein, 378 aa, Unknown
  MUTAGEN 1-378: progenipoeitin protein
AQDEELCGGLWRLVLAQRWMERLKTVAGSKMQGLLERVNTEIHFVTKCAFQPPPSCLRFVQTNISRLLQETSEQLVALKPWITRQNFSRCLELQCQPDSSTLGGGSGGGSGGGSGGGSGGGSGGGSGGGSGTQDCSFQHSPISSDFAVKIRELSDYLLQDYPVTVASNLYVEGGGGSPGEPSGPISTINPSPPSKESHKSPNMATPLGPASSLPQSFLLKCLEQVRKIQGDGAALQEKLCATYKLCHPEELVLLGHSLGIPWAPLSSCPSQALQLAGCLSQLHSGLFLYQGLLQALEGISPELGPTLDTLQLDVADFATTIWQQMEELGMAPALQPTQGAMPAFASAFQRRAGGVLVASHLQSFLEVSYRVLRHLAQP

SEQ ID NO: 201 - protein, 364 aa, Unknown
  MUTAGEN 1-364: progenipoeitin protein
AQDEELCGGLWRLVLAQRWMERLKTVAGSKMQGLLERVNTEIHFVTKCAFQPPPSCLRFVQTNISRLLQETSEQLVALKPWITRQNFSRCLELQCQPDSSTLPPPWSPRPLGATAPTTQDCSFQHSPISSDFAVKIRELSDYLLQDYPVTVASNLYVEGGGGSPGEPSGPISTINPSPPSKESHKSPNMATPLGPASSLPQSFLLKCLEQVRKIQGDGAALQEKLCATYKLCHPEELVLLGHSLGIPWAPLSSCPSQALQLAGCLSQLHSGLFLYQGLLQALEGISPELGPTLDTLQLDVADFATTIWQQMEELGMAPALQPTQGAMPAFASAFQRRAGGVLVASHLQSFLEVSYRVLRHLAQP

SEQ ID NO: 202 - protein, 370 aa, Unknown
  MUTAGEN 1-370: progenipoeitin protein
AQDEELCGGLWRLVLAQRWMERLKTVAGSKMQGLLERVNTEIHFVTKCAFQPPPSCLRFVQTNISRLLQETSEQLVALKPWITRQNFSRCLELQCQPDSSTLPPPWSPRPLGATAPTAGQPPLTQDCSFQHSPISSDFAVKIRELSDYLLQDYPVTVASNLYVEGGGGSPGEPSGPISTINPSPPSKESHKSPNMATPLGPASSLPQSFLLKCLEQVRKIQGDGAALQEKLCATYKLCHPEELVLLGHSLGIPWAPLSSCPSQALQLAGCLSQLHSGLFLYQGLLQALEGISPELGPTLDTLQLDVADFATTIWQQMEELGMAPALQPTQGAMPAFASAFQRRAGGVLVASHLQSFLEVSYRVLRHLAQP

SEQ ID NO: 203 - protein, 378 aa, Unknown
  MUTAGEN 1-378: progenipoeitin protein
ADEELCGGLWRLVLAQRWMERLKTVAGSKMQGLLERVNTEIHFVTKCAFQPPPSCLRFVQTNISRLLQETSEQLVALKPWITRQNFSRCLELQCQPDSSTLGGGSGGGSGGGSGGGSGGGSGGGSGGGSGTQDCSFQHSPISSDFAVKIRELSDYLLQDYPVTVASNLQYVEGGGGSPGEPSGPISTINPSPPSKESHKSPNMATPLGPASSLPQSFLLKCLEQVRKIQGDGAALQEKLCATYKLCHPEELVLLGHSLGIPWAPLSSCPSQALQLAGCLSQLHSGLFLYQGLLQALEGISPELGPTLDTLQLDVADFATTIWQQMEELGMAPALQPTQGAMPAFASAFQRRAGGVLVASHLQSFLEVSYRVLRHLAQP

SEQ ID NO: 204 - protein, 378 aa, Unknown
  MUTAGEN 1-378: progenipoeitin protein
ADEELCGGLWRLVLAQRWMERPKTVAGSKMQGLLERVNTEIHFVTKCAFQPPPSCLRFVQTNISRLLQETSEQLVALKPWITRQNFSRCLELQCQPDSSTLGGGSGGGSGGGSGGGSGGGSGGGSGGGSGTQDCSFQHSPISSDFAVKIRELSDYLLQDYPVTVASNLQYVEGGGGSPGEPSGPISTINPSPPSKESHKSPNMATPLGPASSLPQSFLLKCLEQVRKIQGDGAALQEKLCATYKLCHPEELVLLGHSLGIPWAPLSSCPSQALQLAGCLSQLHSGLFLYQGLLQALEGISPELGPTLDTLQLDVADFATTIWQQMEELGMAPALQPTQGAMPAFASAFQRRAGGVLVASHLQSFLEVSYRVLRHLAQP

SEQ ID NO: 205 - protein, 370 aa, Unknown
  MUTAGEN 1-370: progenipoeitin protein
ADEELCGGLWRLVLAQRWMERLKTVAGSKMQGLLERVNTEIHFVTKCAFQPPPSCLRFVQTNISRLLQETSEQLVALKPWITRQNFSRCLELQCQPDSSTLPPPWSPRPLGATAPTAGQPPLTQDCSFQHSPISSDFAVKIRELSDYLLQDYPVTVASNLQYVEGGGGTPGEPSGPISTINPSPPSKESHKSPNMATPLGPASSLPQSFLLKCLEQVRKIQGDGAALQEKLCATYKLCHPEELVLLGHSLGIPWAPLSSCPSQALQLAGCLSQLHSGLFLYQGLLQALEGISPELGPTLDTLQLDVADFATTIWQQMEELGMAPALQPTQGAMPAFASAFQRRAGGVLVASHLQSFLEVSYRVLRHLAQP

SEQ ID NO: 206 - protein, 347 aa, Unknown
  MUTAGEN 1-347: progenipoeitin protein
ADEELCGGLWRLVLAQRWMERLKTVAGSKMQGLLERVNTEIHFVTKCAFQPPPSCLRFVQTNISRLLQETSEQLVALKPWITRQNFSRCLELQCQPVETVFHRVSQDGLDLLTSTQDCSFQHSPISSDFAVKIRELSDYLLQDYPVTVASNLQYVEGGGGSPGGGSGGGSNMATPLGPASSLPQSFLLKSLEQVRKIQGDGAALQEKLCATNKLCHPEELVLLGHSLGIPWAPLSSCPSQALQLAGCLSQLHSGLFLYQGLLQALEGISPELGPTLDTLQLDVADFATTIWQQMEELGMAPALQPTQGAMPAFASAFQRRAGGVLVASHLQSFLEVSYRVLRHLAQP

SEQ ID NO: 207 - protein, 384 aa, Unknown [sequence omitted]

SEQ ID NO: 208 - protein, 349 aa, Unknown
  MUTAGEN 1-349: progenipoeitin protein
ATQDCSFQHSPISSDFAVKIRELSDYLLQDYPVTVASNLQEPKSPDTHTSPPSPTPLGPASSLPQSFLLKSLEQVRKIQGDGAALQEKLCATYKLCHPEELVLLGHSLGIPWAPLSSCPSQALQLAGCLSQLHSGLFLYQGLLQALEGISPELGPTLDTLQLDVADFATTIWQQMEELGMAPALQPTQGAMPAFASAFQRRAGGVLVASHLQSFLEVSYRVLRHLAQPSAEPKSPDTHTSPPSPGSNLQDEELCGGLWRLVLAQRWMERLKTVAGSKMQGLLERVNTEIHFVTKCAFQPPPSCLRFVQTNISRLLQETSEQLVALKPWITRQNFSRCLELQCQPDSSTL

SEQ ID NO: 209 - protein, 347 aa, Unknown [sequence omitted]

SEQ ID NO: 210 - protein, 355 aa, Unknown
  MUTAGEN 1-355: progenipoeitin protein
ADEELCGGLWRLVLAQRWMERLKTVAGSKMQGLLERVNTEIHFVTKSAFQPPPSCLRFVQTNISRLLQETSEQLVALKPWITRQNFSRCLELQCQPDSSTLGGGSGGGSGGGSGGGSGGGSGTQDSSFQHSPISSDFAVKIRELSDYLLQDYPVTVASNLQYVEGGGGSPGGGSGGGSNMATPLGPASSLPQSFLLKSLEQVRKIQGDGAALQEKLCATNKLCHPEELVLLGHSLGIPWAPLSSCPSQALQLAGCLSQLHSGLFLYQGLLQALEGISPELGPTLDTLQLDVADFATTIWQQMEELGMAPALQPTQGAMPAFASAFQRRAGGVLVASHLQSFLEVSYRVLRHLAQP

SEQ ID NO: 211 - protein, 370 aa, Unknown
  MUTAGEN 1-370: progenipoeitin protein
ATPLGPASSLPQSFLLKSLEQVRKIQGDGAALQEKLCATYKLCHPEELVLLGHSLGIPWAPLSSCPSQALQLAGCLSQLHSGLFLYQGLLQALEGISPELGPTLDTLQLDVADFATTIWQQMEELGMAPALQPTQGAMPAFASAFQRRAGGVLVASHLQSFLEVSYRVLRHLAQPYVEGGGGSPGEPSGPISTINPSPPSKESHKSPNMADEELCGGLWRLVLAQRWMERLKTVAGSKMQGLLERVNTEIHFVTKSAFQPPPSCLRFVQTNISRLLQETSEQLVALKPWITRQNFSRCLELQCQPDSSTLGGGSGGGSGGGSGGGSGGGSGTQDSSFQHSPISSDFAVKIRELSDYLLQDYPVTVASNLQ

SEQ ID NO: 212 - protein, 355 aa, Unknown
  MUTAGEN 1-355: progenipoeitin protein
ADEELCGGLWRLVLAQRWMERLKTVAGSKMQGLLERVNTEIHFVTKCAFQPPPSSLRFVQTNISRLLQETSEQLVALKPWITRQNFSRCLELQSQPDSSTLGGGSGGGSGGGSGGGSGGGSGTQDCSFQHSPISSDFAVKIRELSDYLLQDYPVTVASNLQYVEGGGGSPGGGSGGGSNMATPLGPASSLPQSFLLKSLEQVRKIQGDGAALQEKLCATNKLCHPEELVLLGHSLGIPWAPLSSCPSQALQLAGCLSQLHSGLFLYQGLLQALEGISPELGPTLDTLQLDVADFATTIWQQMEELGMAPALQPTQGAMPAFASAFQRRAGGVLVASHLQSFLEVSYRVLRHLAQP

SEQ ID NO: 213 - protein, 370 aa, Unknown
  MUTAGEN 1-370: progenipoeitin protein
ATPLGPASSLPQSFLLKSLEQVRKIQGDGAALQEKLCATYKLCHPEELVLLGHSLGIPWAPLSSCPSQALQLAGCLSQLHSGLFLYQGLLQALEGISPELGPTLDTLQLDVADFATTIWQQMEELGMAPALQPTQGAMPAFASAFQRRAGGVLVASHLQSFLEVSYRVLRHLAQPYVEGGGGSPGEPSGPISTINPSPPSKESHKSPNMADEELCGGLWRLVLAQRWMERLKTVAGSKMQGLLERVNTEIHFVTKCAFQPPPSSLRFVQTNISRLLQETSEQLVALKPWITRQNFSRCLELQSQPDSSTLGGGSGGGSGGGSGGGSGGGSGTQDCSFQHSPISSDFAVKIRELSDYLLQDYPVTVASNLQ

SEQ ID NO: 214 - protein, 334 aa, Unknown
  MUTAGEN 1-334: progenipoeitin protein
ATQDSSFQHSPISSDFAVKIRELSDYLLQDYPVTVASNLQDEELCGGLWRLVLAQRWMERLKTVAGSKMQGLLERVNTEIHFVTKSAFQPPPSCLRFVQTNISRLLQETSEQLVALKPWITRQNFSRCLELQCQPDSSTLYVEGGGGSPGGGSGGGSNMATPLGPASSLPQSFLLKSLEQVRKIQGDGAALQEKLCATNKLCHPEELVLLGHSLGIPWAPLSSCPSQALQLAGCLSQLHSGLFLYQGLLQALEGISPELGPTLDTLQLDVADFATTIWQQMEELGMAPALQPTQGAMPAFASAFQRRAGGVLVASHLQSFLEVSYRVLRHLAQP

SEQ ID NO: 215 - protein, 334 aa, Unknown
  MUTAGEN 1-334: progenipoeitin protein
ATQDCSFQHSPISSDFAVKIRELSDYLLQDYPVTVASNLQDEELCGGLWRLVLAQRWMERLKTVAGSKMQGLLERVNTEIHFVTKCAFQPPPSSLRFVQTNISRLLQETSEQLVALKPWITRQNFSRCLELQSQPDSSTLYVEGGGGSPGGGSGGGSNMATPLGPASSLPQSFLLKSLEQVRKIQGDGAALQEKLCATNKLCHPEELVLLGHSLGIPWAPLSSCPSQALQLAGCLSQLHSGLFLYQGLLQALEGISPELGPTLDTLQLDVADFATTIWQQMEELGMAPALQPTQGAMPAFASAFQRRAGGVLVASHLQSFLEVSYRVLRHLAQP

SEQ ID NO: 216 - protein, 326 aa, Unknown
  MUTAGEN 1-326: progenipoeitin protein
ATQDCSFQHSPISSDFAVKIRELSDYLLQDYPVTVASNLQDEELCGGLWRLVLAQRWMERLKTVAGSKMQGLLERVNTEIHFVTKCAFQPPPSCLRFVQTNISRLLQETSEQLVALKPWITRQNFSRCLELQYVEGGGGSPGGGSGGGSNMATPLGPASSLPQSFLLKSLEQVRKIQGDGAALQEKLCATNKLCHPEELVLLGHSLGIPWAPLSSCPSQALQLAGCLSQLHSGLFLYQGLLQALEGISPELGPTLDTLQLDVADFATTIWQQMEELGMAPALQPTQGAMPAFASAFQRRAGGVLVASHLQSFLEVSYRVLRHLAQP

SEQ ID NO: 217 - protein, 334 aa, Unknown
  MUTAGEN 1-334: progenipoeitin protein
ATQDCSFQHSPISSDFAVKIRELSDYLLQDYPVTVASNLQDEELCGGLWRLVLAQRWMERLKTVAGSKMQGLLERVNTEIHFVTKCAFQPPPSCLRFVQTNISRLLQETSEQLVALKPWITRQNFSRCLELQSQPDSSTLYVEGGGGSPGGGSGGGSNMATPLGPASSLPQSFLLKSLEQVRKIQGDGAALQEKLCATYKLCHPEELVLLGHSLGIPWAPLSSCPSQALQLAGCLSQLHSGLFLYQGLLQALEGISPELGPTLDTLQLDVADFATTIWQQMEELGMAPALQPTQGAMPAFASAFQRRAGGVLVASHLQSFLEVSYRVLRHLAQP

SEQ ID NO: 218 - protein, 334 aa, Unknown
  MUTAGEN 1-334: progenipoeitin protein
ATQDCSFQHSPISSDFAVKIRELSDYLLQDYPVTVASNLQDEELCGGLWRLVLAQRWMERLKTVAGSKMQGLLERVNTEIHFVTKCAFQPPPSCLRFVQTNISRLLQETSEQLVALKPWITRQNFSRRLELQSQPDSSTLYVEGGGGSPGGGSGGGSNMATPLGPASSLPQSFLLKSLEQVRKIQGDGAALQEKLCATNKLCHPEELVLLGHSLGIPWAPLSSCPSQALQLAGCLSQLHSGLFLYQGLLQALEGISPELGPTLDTLQLDVADFATTIWQQMEELGMAPALQPTQGAMPAFASAFQRRAGGVLVASHLQSFLEVSYRVLRHLAQP

SEQ ID NO: 219 - protein, 352 aa, Unknown
  MUTAGEN 1-352: progenipoeitin protein
ADEELCGGLWRLVLAQRWMERLKTVAGSKMQGLLERVNTEIHFVTKCAFQPPPSCLRFVQTNISRLLQETSEQLVALKPWITRQNFSRCLELQCQPDSSTLGGGSGGGSGGGSGGGSGGGSGTQDCSFQHSPISSDFAVKIRELSDYLLQDYPVTVASNLQYVEGGGGSPGGGSGGGSNMATQGAMPAFASAFQRRAGGVLVASHLQSFLEVSYRVLRHLAQPSGGSGGSQSFLLKSLEQVRKIQGDGAALQEKLCATYKLCHPEELVLLGHSLGIPWAPLSSCPSQALQLAGCLSQLHSGLFLYQGLLQALEGISPELGPTLDTLQLDVADFATTIWQQMEELGMAPALQP

SEQ ID NO: 220 - protein, 367 aa, Unknown
  MUTAGEN 1-367: progenipoeitin protein
ATQGAMPAFASAFQRRAGGVLVASHLQSFLEVSYRVLRHLAQPSGGSGGSQSFLLKSLEQVRKIQGDGAALQEKLCATYKLCHPEELVLLGHSLGIPWAPLSSCPSQALQLAGCLSQLHSGLFLYQGLLQALEGISPELGPTLDTLQLDVADFATTIWQQMEELGMAPALQPYVEGGGGSPGEPSGPISTINPSPPSKESHKSPNMADEELCGGLWRLVLAQRWMERLKTVAGSKMQGLLERVNTEIHFVTKCAFQPPPSCLRFVQTNISRLLQETSEQLVALKPWITRQNFSRCLELQCQPDSSTLGGGSGGGSGGGSGGGSGGGSGTQDCSFQHSPISSDFAVKIRELSDYLLQDYPVTVASNLQ

SEQ ID NO: 221 - protein, 344 aa, Unknown
  MUTAGEN 1-344: progenipoeitin protein
ADEELCGGLWRLVLAQRWMERLKTVAGSKMQGLLERVNTEIHFVTKCAFQPPPSCLRFVQTNISRLLQETSEQLVALKPWITRQNFSRCLELQCQPDSSTLGGGSGGGSGGGSGGGTQDCSFQHSPISSDFAVKIRELSDYLLQDYPVTVASNLQYVEGGGGSPGEPSGPISTINPSPPSKESHKSPNMADEELCGGLWRLVLAQRWMERLKTVAGSKMQGLLERVNTEIHFVTKCAFQPPPSCLRFVQTNISRLLQETSEQLVALKPWITRQNFSRCLELQCQPDSSTLGGGSGGGSGGGSGGGTQDCSFQHSPISSDFAVKIRELSDYLLQDYPVTVASNLQ

SEQ ID NO: 222 - protein, 335 aa, Unknown
  MUTAGEN 1-335: progenipoeitin protein
ADEELCGGLWRLVLAQRWMERLKTVAGSKMQGLLERVNTEIHFVTKCAFQPPPSCLRFVQTNISRLLQETSEQLVALKPWITRQNFSRCLELQCQPDSSTLGGGSGGGSGGGSGGGSGGGSGTQDCSFQHSPISSDFAVKIRELSDYLLQDYPVTVASNLQYVEGGGGSPGEPSGPISTINPSPPSKESHKSPNMATQDCSFQHSPISSDFAVKIRELSDYLLQNYPVTVASNLQDEELCGGLWRLVLAQRWMERLKTVAGSKMQGLLERVNTEIHFVTKCAFQPPPSCLRFVQTNISRLLQETSEQLVALKPWITRQNFSRCLELQCQPDSSTL

SEQ ID NO: 223 - protein, 550 aa, Unknown
  MUTAGEN 1-550: progenipoeitin protein
ADEELCGGLWRLVLAQRWMERLKTVAGSKMQGLLERVNTEIHFVTKCAFQPPPSCLRFVQTNISRLLQETSEQLVALKPWITRQNFSRCLELQCQPDSSTLGGGSGGGSGGGSGGGSGGGSGTQDCSFQHSPISSDFAVKIRELSDYLLQDYPVTVASNLQYVEGGGGSPGGGSGGGSNMATPLGPASSLPQSFLLKSLEQVRKIQGDGAALQEKLCATYKLCHPEELVLLGHSLGIPWAPLSSCPSQALQLAGCLSQLHSGLFLYQGLLQALEGISPELGPTLDTLQLDVADFATTIWQQMEELGMAPALQPTQGAMPAFASAFQRRAGGVLVASHLQSFLEVSYRVLRHLAQPYVEGGGGSPGEPSGPISTINPSPPSKESHKSPNMADEELCGGLWRLVLAQRWMERLKTVAGSKMQGLLERVNTEIHFVTKCAFQPPPSCLRFVQTNISRLLQETSEQLVALKPWITRQNFSRCLELQCQPDSSTLGGGSGGGSGGGSGGGSGGGSGTQDCSFQHSPISSDFAVKIRELSDYLLQDYPVTVASNLQ

SEQ ID NO: 224 - protein, 544 aa, Unknown
  MUTAGEN 1-544: progenipoeitin protein
ATPLGPASSLPQSFLLKSLEQVRKIQGDGAALQEKLCATYKLCHPEELVLLGHSLGIPWAPLSSCPSQALQLAGCLSQLHSGLFLYQGLLQALEGISPELGPTLDTLQLDVADFATTIWQQMEELGMAPALQPTQGAMPAFASAFQRRAGGVLVASHLQSFLEVSYRVLRHLAQPYVEGGGGSPGEPSGPISTINPSPPSKESHKSPNMADEELCGGLWRLVLAQRWMERLKTVAGSKMQGLLERVNTEIHFVTKCAFQPPPSCLRFVQTNISRLLQETSEQLVALKPWITRQNFSRCLELQCQPDSSTLGGGSGGGSGGGSGGGSGGGSGTQDCSFQHSPISSDFAVKIRELSDYLLQDYPVTVASNLQYVEGGGGSPGEPSGPISTINPSPPSKESHKSPNMATQDCSFQHSPISSDFAVKIRELSDYLLQDYPVTVASNLQDEELCGGLWRLVLAQRWMERLKTVAGSKMQGLLERVNTEIHFVTKCAFQPPPSCLRFVQTNISRLLQETSEQLVALKPWITRQNFSRCLELQCQPDSSTL

SEQ ID NO: 225 - protein, 565 aa, Unknown
  MUTAGEN 1-565: progenipoeitin protein
ATPLGPASSLPQSFLLKSLEQVRKIQGDGAALQEKLCATYKLCHPEELVLLGHSLGIPWAPLSSCPSQALQLAGCLSQLHSGLFLYQGLLQALEGISPELGPTLDTLQLDVADFATTIWQQMEELGMAPALQPTQGAMPAFASAFQRRAGGVLVASHLQSFLEVSYRVLRHLAQPYVEGGGGSPGEPSGPISTINPSPPSKESHKSPNMADEELCGGLWRLVLAQRWMERLKTVAGSKMQGLLERVNTEIHFVTKCAFQPPPSCLRFVQTNISRLLQETSEQLVALKPWITRQNFSRCLELQCQPDSSTLGGGSGGGSGGGSGGGSGGGSGTQDCSFQHSPISSDFAVKIRELSDYLLQDYPVTVASNLQYVEGGGGSPGEPSGPISTINPSPPSKESHKSPNMADEELCGGLWRLVLAQRWMERLKTVAGSKMQGLLERVNTEIHFVTKCAFQPPPSCLRFVQTNISRLLQETSEQLVALKPWITRQNFSRCLELQCQPDSSTLGGGSGGGSGGGSGGGSGGGSGTQDCSFQHSPISSDFAVKIRELSDYLLQDYPVTVASNLQ

SEQ ID NO: 226 - protein, 502 aa, Unknown
  MUTAGEN 1-502: progenipoeitin protein
ANCSIMIDEIIHHLKRPPAPLLDPNNLNDEDVSILMDRNLRLPNLESFVRAVKNLENASGIEAILRNLQPCLPSATAAPSRHPIIIKAGDWQEFREKLTFYLVTLEQAQEQQYVEGGGGSPGEPSGPISTINPSPPSKESHKSPNMADEELCGGLWRLVLAQRWMERLKTVAGSKMQGLLERVNTEIHFVTKCAFQPPPSCLRFVQTNISRLLQETSEQLVALKPWITRQNFSRCLELQCQPDSSTLGGGSGGGSGGGSGGGSGGGSGTQDCSFQHSPISSDFAVKIRELSDYLLQDYPVTVASNLQYVEGGGGSPGEPSGPISTINPSPPSKESHKSPNMADEELCGGLWRLVLAQRWMERLKTVAGSKMQGLLERVNTEIHFVTKCAFQPPPSCLRFVQTNISRLLQETSEQLVALKPWITRQNFSRCLELQCQPDSSTLGGGSGGGSGGGSGGGSGGGSGTQDCSFQHSPISSDFAVKIRELSDYLLQDYPVTVASNLQ

SEQ ID NO: 227 - protein, 562 aa, Unknown
  MUTAGEN 1-562: progenipoeitin protein
ADEELCGGLWRLVLAQRWMERLKTVAGSKMQGLLERVNTEIHFVTKCAFQPPPSCLRFVQTNISRLLQETSEQLVALKPWITRQNFSRCLELQCQPDSSTLGGGSGGGSGGGSGGGSGGGSGTQDCSFQHSPISSDFAVKIRELSDYLLQDYPVTVASNLQYVEGGGGSPGGGSGGGSNMADEELCGGLWRLVLAQRWMERLKTVAGSKMQGLLERVNTEIHFVTKCAFQPPPSCLRFVQTNISRLLQETSEQLVALKPWITRQNFSRCLELQCQPDSSTLGGGSGGGSGGGSGGGSGGGSGTQDCSFQHSPISSDFAVKIRELSDYLLQDYPVTVASNLQYVEGGGGSPGEPSGPISTINPSPPSKESHKSPNMATPLGPASSLPQSFLLKCLEQVRKIQGDGAALQEKLCATYKLCHPEELVLLGHSLGIPWAPLSSCPSQALQLAGCLSQLHSGLFLYQGLLQALEGISPELGPTLDTLQLDVADFATTIWQQMEELGMAPALQPTQGAMPAFASAFQRRAGGVLVASHLQSFLEVSYRVLRHLAQPSTPSTPGSEFGS

SEQ ID NO: 228 - protein, 490 aa, Unknown
  MUTAGEN 1-490: progenipoeitin protein
ADEELCGGLWRLVLAQRWMERLKTVAGSKMQGLLERVNTEIHFVTKCAFQPPPSCLRFVQTNISRLLQETSEQLVALKPWITRQNFSRCLELQCQPDSSTLGGGSGGGSGGGSGGGTQDCSFQHSPISSDFAVKIRELSDYLLQDYPVTVASNLQYVEGGGGSPGEPSGPISTINPSPPSKESHKSPNMANCSIMIDEIIHHLKRPPNPLLDPNNLNSEDMDILMERNLRTPNLLAFVRAVKHLENASGIEAILRNLQPCLPSATAAPSRHPIIIKAGDWQEFREKLTFYLVTLEQAQEQQYVEGGGGSPGEPSGPISTINPSPPSKESHKSPNMADEELCGGLWRLVLAQRWMERLKTVAGSKMQGLLERVNTEIHFVTKCAFQPPPSCLRFVQTNISRLLQETSEQLVALKPWITRQNFSRCLELQCQPDSSTLGGGSGGGSGGGSGGGTQDCSFQHSPISSDFAVKIRELSDYLLQDYPVTVASNLQ

SEQ ID NO: 229 - protein, 398 aa, Unknown
  MUTAGEN 1-398: progenipoeitin protein
ADEELCGGLWRLVLAQRWMERLKTVAGSKMQGLLERVNTEIHFVTKCAFQPPPSCLRFVQTNISRLLQETSEQLVALKPWITRQNFSRCLELQCQPDSSTLGGGSGGGSGGGSGGGSGGGSGTQDCSFQHSPISSDFAVKIRELSDYLLQDYPVTVASNLQEFKLEPRGPTIKPCPPCKCPAPNLLGGPSVFIFPPKIKDVLMISLSPIVTCVVVDVSEDDPDVQISWFVNNVEVHTAQTQTHREDYNSTLRAVSALPIQHQDWMSGKEFKCKVNNKDLPAPIERTISKPKGSVRAPQVYVLPPPEEEMTKKQVTLTCMVTDFMPEDIYVEWTNNGKTELNYKNTEPVLDSDGSYFMYSKLRVEKKNWVERNSYSCSVVHEGLHNHHTTKSFSRTPGK

SEQ ID NO: 230 - protein, 377 aa, Unknown
  MUTAGEN 1-377: progenipoeitin protein
ATQDCSFQHSPISSDFAVKIRELSDYLLQDYPVTVASNLQDEELCGGLWRLVLAQRWMERLKTVAGSKMQGLLERVNTEIHFVTKCAFQPPPSCLRFVQTNISRLLQETSEQLVALKPWITRQNFSRCLELQCQPDSSTLEFKLEPRGPTIKPCPPCKCPAPNLLGGPSVFIFPPKIKDVLMISLSPIVTCVVVDVSEDDPDVQISWFVNNVEVHTAQTQTHREDYNSTLRAVSALPIQHQDWMSGKEFKCKVNNKDLPAPIERTISKPKGSVRAPQVYVLPPPEEEMTKKQVTLTCMVTDFMPEDIYVEWTNNGKTELNYKNTEPVLDSDGSYFMYSKLRVEKKNWVERNSYSCSVVHEGLHNHHTTKSFSRTPGK

SEQ ID NO: 231 - protein, 4 aa, Artificial sequence
  MUTAGEN 1-4: linker
GGGS

SEQ ID NO: 232 - protein, 8 aa, Artificial sequence
  MUTAGEN 1-8: linker
GGGSGGGS

SEQ ID NO: 233 - protein, 12 aa, Artificial sequence
  MUTAGEN 1-12: linker
GGGSGGGSGGGS

SEQ ID NO: 234 - protein, 7 aa, Artificial sequence
  MUTAGEN 1-7: linker
SGGSGGS

SEQ ID NO: 235 - protein, 5 aa, Artificial sequence
  MUTAGEN 1-5: linker
EFGNM

SEQ ID NO: 236 - protein, 6 aa, Artificial sequence
  MUTAGEN 1-6: linker
EFGGNM

SEQ ID NO: 237 - protein, 9 aa, Artificial sequence
  MUTAGEN 1-9: linker
EFGGNGGNM

SEQ ID NO: 238 - protein, 7 aa, Artificial sequence
  MUTAGEN 1-7: linker
GGSDMAG

SEQ ID NO: 239 - protein, 5 aa, Artificial sequence
  MUTAGEN 1-5: linker
SGGNG

SEQ ID NO: 240 - protein, 10 aa, Artificial sequence
  MUTAGEN 1-10: linker
SGGNGSGGNG

SEQ ID NO: 241 - protein, 15 aa, Artificial sequence
  MUTAGEN 1-15: linker
SGGNGSGGNGSGGNG

SEQ ID NO: 242 - protein, 10 aa, Artificial sequence
  MUTAGEN 1-10: linker
SGGSGSGGSG

SEQ ID NO: 243 - protein, 15 aa, Artificial sequence
  MUTAGEN 1-15: linker
SGGSGSGGSGSGGSG

SEQ ID NO: 244 - protein, 6 aa, Artificial sequence
  MUTAGEN 1-6: linker
GGGSGG

SEQ ID NO: 245 - protein, 7 aa, Artificial sequence
  MUTAGEN 1-7: linker
GGGSGGG

SEQ ID NO: 246 - protein, 10 aa, Artificial sequence
  MUTAGEN 1-10: linker
GGGSGGGSGG

SEQ ID NO: 247 - protein, 13 aa, Artificial sequence
  MUTAGEN 1-13: linker
GGGSGGGSGGGSG

SEQ ID NO: 248 - protein, 15 aa, Artificial sequence
  MUTAGEN 1-15: linker
GGGSGGGSGGGSGGG

SEQ ID NO: 249 - protein, 21 aa, Artificial sequence
  MUTAGEN 1-21: linker
GGGSGGGSGGGSGGGSGGGSG

SEQ ID NO: 250 - protein, 21 aa, Artificial sequence
  MUTAGEN 1-21: linker
PPPWSPRPLGATAPTAGQPPL

SEQ ID NO: 251 - protein, 15 aa, Artificial sequence
  MUTAGEN 1-15: linker
PPPWSPRPLGATAPT

SEQ ID NO: 252 - protein, 16 aa, Artificial sequence
  MUTAGEN 1-16: linker
VETVFHRVSQDGLLTS

SEQ ID NO: 253 - protein, 36 aa, Artificial sequence
  MUTAGEN 1-36: linker
GGGSGGGSGGGSEGGGSEGGGSEGGGSEGGGSGGGS

SEQ ID NO: 254 - protein, 24 aa, Artificial sequence
  MUTAGEN 1-24: linker
ISEPSGPISTINPSPPSKESHKSP

SEQ ID NO: 255 - protein, 28 aa, Artificial sequence
  MUTAGEN 1-28: linker
IEGRISEPSGPISTINPSPPSKESHKSP

SEQ ID NO: 256 - protein, 112 aa, Unknown
  MUTAGEN 1-112: IL-3 variant
ANCSIMIDEIIHHLKRPPAPLLDPNNLNAEDVDILMERNLRLPNLESFVRAVKNLENASGIEAILRNLQPCLPSATAAPSRHPIIIKAGDWQEFREKLTFYLVTLEQAQEQQ

SEQ ID NO: 257 - protein, 112 aa, Unknown
  MUTAGEN 1-112: IL-3 variant
ANCSIMIDEIIHHLKRPPNPLLDPNNLNSEDMDILMERNLRTPNLLAFVRAVKHLENASGIEAILRNLQPCLPSATAAPSRHPIIIKAGDWQEFREKLTFYLVTLEQAQEQQ

SEQ ID NO: 258 - protein, 112 aa, Unknown
  MUTAGEN 1-112: IL-3 variant
ANCSIMIDEIIHHLKVPPAPLLDSNNLNSEDMDILMERNLRLPNLLAFVRAVKNLENASGIEAILRNLQPCLPSATAAPSRHPIIIKAGDWQEFREKLTFYLVTLEQAQEQQ

SEQ ID NO: 259 - protein, 111 aa, Unknown
  MUTAGEN 1-111: IL-3 variant
NCSIMIDEIIHHLKRPPAPLLDPNNLNDEDVSILMDRNLRLPNLESFVRAVKNLENASGIEAILRNLQPCLPSATAAPSRHPIIIKAGDWQEFREKLTFYLVTLEQAQEQQ

SEQ ID NO: 260 - protein, 174 aa, Unknown
  MUTAGEN 1: Xaa at position 1 is Thr, Ser, Arg, Tyr or Gly;
  MUTAGEN 2: Xaa at position 2 is Pro or Leu;
  MUTAGEN 3: Xaa at position 3 is Leu, Arg, Tyr or Ser;
  MUTAGEN 13: Xaa at position 13 is Phe, Ser, His, Thr or Pro;
  MUTAGEN 16: Xaa at position 16 is Lys, Pro, Ser, thr or His;
  MUTAGEN 17: Xaa at position 17 is Cys, Ser, Gly, Ala, Ile, Tyr or Arg;
  MUTAGEN 18: Xaa at position 18 is Leu, Thr, Pro, His, Ile or Cys;
  MUTAGEN 22: Xaa at position 22 is Arg, Tyr, Ser, Thr or Ala;
  MUTAGEN 24: Xaa at position 24 is Ile, Pro, Tyr or Leu;
  MUTAGEN 27: Xaa at position 27 is Asp or Gly;
  MUTAGEN 30: Xaa at position 30 is Ala, Ile, Leu or Gly;
  MUTAGEN 34: Xaa at position 34 is Lys or Ser;
  MUTAGEN 36: Xaa at position 36 is Cys or Ser;
  MUTAGEN 42: Xaa at position 42 is Cys or Ser;
  MUTAGEN 43: Xaa at position 43 is His, Thr, Gly, Val, Lys, Trp, Ala, Arg, Cys, or Leu;
  MUTAGEN 44: Xaa at position 44 is Pro, Gly, Arg, Asp, Val, Ala, His, Trp, Gln, or Thr;
  MUTAGEN 46: Xaa at position 46 is Glu, Arg, Phe, Arg, Ile or Ala;
  MUTAGEN 47: Xaa at position 47 is Leu or Thr;
  MUTAGEN 49: Xaa at position 49 is Leu, Phe, Arg or Ser;
  MUTAGEN 50: Xaa at position 50 is Leu, Ile, His, Pro or Tyr;
  MUTAGEN 54: Xaa at position 54 is Leu or His;
  MUTAGEN 64: Xaa at position 64 is Cys or Ser;
  MUTAGEN 67: Xaa at position 67 is Gln, Lys, Leu or Cys;
  MUTAGEN 70: Xaa at position 70 is Gln, Pro, Leu, Arg or Ser;
  MUTAGEN 74: Xaa at position 74 is Cys or Ser;
  MUTAGEN 104: Xaa at position 104 is Asp, Gly or Val;
  MUTAGEN 108: Xaa at position 108 is Leu, Ala, Val, Arg, Trp, Gln or Gly;
  MUTAGEN 115: Xaa at position 115 is Thr, His, Leu or Ala;
  MUTAGEN 120: Xaa at position 120 is Gln, Gly, Arg, Lys or His
  MUTAGEN 123: Xaa at position 123 is Glu, Arg, Phe or Thr
  MUTAGEN 144: Xaa at position 144 is Phe, His, Arg, Pro, Leu, Gln or Glu;
  MUTAGEN 146: Xaa at position146 is Arg or Gln;
  MUTAGEN 147: Xaa ap position 147 is Arg or Gln;
  MUTAGEN 156: Xaa at position 156 is His, Gly or Ser;
  MUTAGEN 159: Xaa at position 159 is Ser, Arg, Thr, Tyr, Val or Gly;
  MUTAGEN 162: Xaa at position 162 is Glu, Leu, Gly or Trp;
  MUTAGEN 163: Xaa at position 163 is Val, Gly, Arg or Ala;
  MUTAGEN 169: Xaa at position 169 is Arg, Ser, Leu, Arg or Cys;
  MUTAGEN 170: Xaa at position 170 is His, Arg or Ser;
XXXGPASSLPQSXLLXXXEQVXKXQGXGAXLQEXLXATYKLXXXEXXVXXGHSXGIPWAPLSSXPSXALXLAGXLSQLHSGLFLYQGLLQALEGISPELGPTLXTLQXDVADFAXTIWQQMEXXGMAPALQPTQGAMPAFASAXQXXAGGVLVASXLQXFLXXSYRVLXXLAQP

SEQ ID NO: 261 - protein, 133 aa, Unknown
  MUTAGEN 17: Xaa at position 17 is Ser, Lys, Gly, Asp, Met, Gln, or Arg;
  MUTAGEN 18: Xaa at position 18 is Asn, His, Leu, Ile, Phe, Arg, or Gln;
  MUTAGEN 19: Xaa at position 19 is Met, Phe, Ile, Arg, Gly, Ala, or Cys;
  MUTAGEN 20: Xaa at position 20 is Ile, Cys, Gln, Glu, Arg, Pro, or Ala;
  MUTAGEN 21: Xaa at position 21 is Asp, Phe, Lys, Arg, Ala, Gly, Glu, Gln, Asn, Thr, Ser or Val;
  MUTAGEN 22: Xaa at position 22 is Glu, Trp, Pro, Ser, Ala, His, Asp, Asn, Gln, Leu, Val or Gly;
  MUTAGEN 23: Xaa at position 23 is Ile, Val, Ala, Gly, Trp, Lys, Phe, Leu, Ser, or Arg;
  MUTAGEN 24: Xaa at position 24 is Ile, Gly, Val, Arg, Ser, Phe, Leu;
  MUTAGEN 25: Xaa at position 25 is Thr, His, Gly, Gln, Arg, Pro, or Ala;
  MUTAGEN 26: Xaa at position 26 is His, Thr, Phe, Gly, Arg, Ala, Trp;
  MUTAGEN 27: Xaa at position 27 is Leu, Gly, Arg, Thr, Ser, or Ala;
  MUTAGEN 28: Xaa at position 28 is Lys, Arg, Leu, Gln, Gly, Pro, Val or Trp;
  MUTAGEN 29: Xaa at position 29 is Gln, Asn, Leu, Pro, Arg, or Val;
  MUTAGEN 30: Xaa at position 30 is Pro, His, Thr, Gly, Asp, Gln, Ser, Leu, or Leu
  MUTAGEN 31: Xaa at position 31 is Pro, Asp, Gly, Ala, Arg, Leu, or Gln;
  MUTAGEN 32: Xaa at position 32 is Leu, Val, Arg, Gln, Asn, Gly, Ala, or Glu;
  MUTAGEN 33: Xaa at position 33 is Pro, Leu, Gln, Ala, Thr, or Glu;
  MUTAGEN 34: Xaa at position 34 is Leu, Val, Gly, Ser, Lys, Glu, Gln, Thr, Arg, Ala, Phe, Ile or Met;
  MUTAGEN 35: Xaa at position 35 is Leu, Ala, Gly, Asn, Pro, Gln, or Val;
  MUTAGEN 36: Xaa at position 36 is Asp, Leu, or Val;
  MUTAGEN 37: Xaa at position 37 is Phe, Ser, Pro, Trp, or Ile;
  MUTAGEN 38: Xaa at position 38 is Asn, or Ala;
  MUTAGEN 40: Xaa at position 40 is Leu, Trp, or Arg;
  MUTAGEN 41: Xaa at position 41 is Asn, Cys, Arg, Leu, His, Met, or pro;
  MUTAGEN 42: Xaa at position 42 is Gly, Asp, Ser, Cys, Asn, Lys, Thr, Leu, Val, Glu, Phe, Tyr, Ile, Met or Ala;
  MUTAGEN 43: Xaa at position 43 is Glu, Asn, Tyr, Leu, Phe, Asp, Ala, Cys, Gln, Arg, Thr, Gly, or Ser;
  MUTAGEN 44: Xaa at position 44 is Asp, Ser, Leu, Arg, Lys, Thr, Met, Trp, Glu, Asn, Gln, Ala or Pro;
  MUTAGEN 45: Xaa at position 45 is Gln, Pro, Phe, Val, Met, Leu, Thr, Lys, Trp, Asp, Asn, Arg, Ser, Ala, Ile, Glu or His;
  MUTAGEN 46: Xaa at position 46 is Asp, Phe, Ser, Thr, Cys, Glu, Asn, Gln, Lys, His, Ala, Tyr, Ile, Val or Gly;
  MUTAGEN 47: Xaa at position 47 is Ile, Gly, Val, Ser, Arg, Pro, or His;
  MUTAGEN 48: Xaa at position 48 is Leu, Ser, Cys, Arg, Ile, His, Phe, Glu, Lys, Thr, Ala, Met, Val or Asn;
  MUTAGEN 49: Xaa at position 49 is Met, Arg, Ala, Gly, Pro, Asn, His, or Asp;
  MUTAGEN 50: Xaa at position 50 is Glu, Leu, Thr, Asp, Tyr, Lys, Asn, Ser, Ala, Ile, Val, His, Phe, Met or Gln;
  MUTAGEN 51: Xaa at position 51 is Asn, Arg, Met, Pro, Ser, Thr, or his;
  MUTAGEN 52: Xaa at position 52 is Asn, His, Arg, Leu, Gly, Ser, or Thr;
  MUTAGEN 53: Xaa at position 53 is Leu, Thr, Ala, Gly, Glu, Pro, Lys, Ser, or M...
  MUTAGEN 54: Xaa at position 54 is Arg, Asp, Ile, Ser, Val, Thr, Gln, Asn, Lys, His, Ala or Leu;
  MUTAGEN 55: Xaa at position 55 is Arg, Thr, Val, Ser, Leu, or Gly;
  MUTAGEN 56: Xaa at position 56 is Pro, Gly, Cys, Ser, Gln, Glu, Arg, His, Thr, Ala, Tyr, Phe, Leu, Val or Lys;
  MUTAGEN 57: Xaa at position 57 is Asn or Gly;
  MUTAGEN 58: Xaa at position 58 is Leu, Ser, Asp, Arg, Gln, Val, or Cys;
  MUTAGEN 59: Xaa at position 59 is Glu, Tyr, His, Leu, Pro, or Arg;
  MUTAGEN 60: Xaa at position 60 is Ala, Ser, Pro, Tyr, Asn, or Thr;
  MUTAGEN 61: Xaa at position 61 is Phe, Asn, Glu, Pro, Lys, Arg, or Ser;
  MUTAGEN 62: Xaa at position 62 is Asn, His, Val, Arg, Pro, Thr, Asp, or Ile;
  MUTAGEN 63: Xaa at position 63 is Arg, Tyr, Trp, Lys, Ser, His, Pro, or Val;
  MUTAGEN 64: Xaa at position 64 is Ala, Asn, Pro, Ser, or Lys;
  MUTAGEN 65: Xaa at position 65 is Val, Thr, Pro, His, Leu, Phe, or Ser;
  MUTAGEN 66: Xaa at position 66 is Lys, Ile, Arg, Val, Asn, Glu, or Ser;
  MUTAGEN 67: Xaa at position 67 is Ser, Ala, Phe, Val, Gly, Asn, Ile, Pro, or His;
  MUTAGEN 68: Xaa at position 68 is Leu, Val, Trp, Ser, Ile, Phe, Thr, or His;
  MUTAGEN 69: Xaa at position 69 is Gln, Ala, Pro, Thr, Glu, Arg, Trp, Gly, or Leu
  MUTAGEN 70: Xaa at position 70 is Asn, Leu, Val, Trp, pro, or Ala;
  MUTAGEN 71: Xaa at position 71 is Ala, Met, Leu, Pro, Arg, Glu, Thr, Gln, Trp, or Asn;
  MUTAGEN 72: Xaa at position 72 is Ser, Glu, Met, Ala, His, Asn, Arg, or Asp;
  MUTAGEN 73: Xaa at position 73 is Ala, Glu, Asp, Leu, Ser, Gly, Thr, or Arg;
  MUTAGEN 74: Xaa at position 74 is Ile, Met, Thr, Pro, Arg, Gly, Ala;
  MUTAGEN 75: Xaa at position 75 is Glu, Lys, Gly, Asp, Pro, Trp, Arg, Ser, Gln, or Leu;
  MUTAGEN 76: Xaa at position 76 is Ser, Val, Ala, Asn, Trp, Glu, Pro, Gly, or Ala
  MUTAGEN 77: Xaa at position 77 is Ile, Ser, Arg, Thr, or Leu;
  MUTAGEN 78: Xaa at position 78 is Leu, Ala, Ser, Glu, Phe, Gly, or Arg;
  MUTAGEN 79: Xaa at position 79 is Lys, Thr, Asn, Met, Arg, Ile, Gly, or Asp;
  MUTAGEN 80: Xaa position at 80 is Asn, Trp, Val, Gly, Thr, Leu, Glu, or Arg;
  MUTAGEN 81: Xaa at position 81 is Leu, Gln, Gly, Ala, Trp, Arg, Val, or Lys;
  MUTAGEN 82: Xaa at position 82 is Leu, Gln, Lys, Trp, Arg, Asp, Glu, Asn, His, Thr, Ser, Ala, Tyr, Phe, Ile, Met or Val;
  MUTAGEN 83: Xaa at position 83 is Pro, Ala, Thr, Trp, Arg, or Met;
  MUTAGEN 84: Xaa at position 84 is Cys, Glu, Gly, Arg, Met, or Val;
  MUTAGEN 85: Xaa at position 85 is Leu, Asn, Val, or Gln;
  MUTAGEN 86: Xaa at position 86 is Pro, Cys, Arg, Ala, or Lys;
  MUTAGEN 87: Xaa at position 87 is Leu, Ser, Trp, or Gly;
  MUTAGEN 88: Xaa at position 88 is Ala, Lys, Arg, Val, or Trp;
  MUTAGEN 89: Xaa at position 89 is Thr, Asp, Cys, Leu, Val, Glu, His, Asn, or Ser
  MUTAGEN 90: Xaa at position 90 is Ala, Pro, Ser, Thr, Gly, Asp, Ile, or ,Met;
  MUTAGEN 91: Xaa at position 91 is Ala, Pro, Ser, Thr, Phe, Leu, Asp, or His;
  MUTAGEN 92: Xaa at position 92 is Pro, Phe, Arg, Ser, Lys, His, Ala, Gly, Ile or Leu;
  MUTAGEN 93: Xaa at position 93 is Thr, Asp, Ser, Asn, Pro, Ala, Leu, or Arg;
  MUTAGEN 94: Xaa at position 94 is Arg, Ile, Ser, Glu, Leu, Val, Gln, Lys, His, Ala, or Pro;
  MUTAGEN 95: Xaa at position 95 is His, Gln, Pro, Arg, Val, Leu, Gly, Thr, Asn, Lys, Ser, Ala, Trp, Phe, Ile, or T yr;
  MUTAGEN 96: Xaa at position 96 is Pro, Lys, Tyr, Gly, Ile, or Thr;
  MUTAGEN 97: Xaa at position 97 is Ile, Val, Lys, Ala, or Asn;
  MUTAGEN 98: Xaa at position 98 is His, Ile, Asn, Leu, Asp, Ala, Thr, Glu, Gln, Ser, Phe, Met, Val, Lys, Arg, Tyr, or Pro;
  MUTAGEN 99: Xaa at position 99 is Ile, Leu, Arg, Asp, Val, Pro, Gln, Gly, Ser, Phe, or His;
  MUTAGEN 100: Xaa at position 100 is Lys, Tyr, Leu, His, Arg, Ile, Ser, Gln, or ...
  MUTAGEN 101: Xaa at position is Asp, Pro, Met, Lys, His, Thr, Val, Tyr, Glu, Asn, Ser, Ala, Gly, Ile, Leu, or Gln;
  MUTAGEN 102: Xaa at position 102 is Gly, Leu, Glu, Lys, Ser, Tyr, or Pro;
  MUTAGEN 103: Xaa at position 103 is Asp, or Ser;
  MUTAGEN 104: Xaa at position 104 is Trp, Val, Cys, Tyr, Thr, Met, Pro, Leu, Gln, Lys, Ala, Phe, or Gly;
  MUTAGEN 105: Xaa at position 105 is Asn, Pro, Ala, Phe, Ser, Trp, Gln, Tyr, Leu, Lys, Ile, Asp, or His;
  MUTAGEN 106: Xaa at position 106 is Glu, Ser, Ala, Lys, Thr, Ile, Gly, or Pro;
  MUTAGEN 108: Xaa at position 108 is Arg, Lys, Asp, Leu, Thr, Ile, Gln, His, Ser, Ala or Pro;
  MUTAGEN 109: Xaa at position 109 is Arg, Thr, Pro, Glu, Tyr, Leu, Ser, or Gly;
  MUTAGEN 110: Xaa at position 110 is Lys, Ala, Asn, Thr, Leu, Arg, Gln, His, Glu, Ser, or Trp;
  MUTAGEN 111: Xaa at position 111 is Leu, Ile, Arg, Asp, or Met;
  MUTAGEN 112: Xaa at position 112 is Thr, Val, Gln, Tyr, Glu, His, Ser, or Phe;
  MUTAGEN 113: Xaa at position 113 is Phe, Ser, Cys, His, Gly, Trp, Tyr, Asp, Lys, Leu, Ile, Val or Asn;
  MUTAGEN 114: Xaa at position 114 is Tyr, Cys, His, Ser, Trp, Arg, or Leu;
  MUTAGEN 115: Xaa at position 115 is Leu, Asn, Val, Pro, Arg, Ala, His, Thr, Trp, or Met;
  MUTAGEN 116: Xaa at position 116 is Lys, Leu, Pro, Thr, Met, Asp, Val, Glu, Arg, Trp, Ser, Asn, His, Ala, Tyr, Phe , Gln, or Ile;
  MUTAGEN 117: Xaa at position 117 is Thr, Ser, Asn, Ile, Trp, Lys, or Pro;
  MUTAGEN 118: Xaa at position 118 is Leu, Ser, Pro, Ala, Glu, Cys, Asp, or Tyr;
  MUTAGEN 119: Xaa at position 119 is Glu, Ser, Lys, Pro, leu, Thr, Tyr, or Arg;
  MUTAGEN 120: Xaa at position 120 is Asn, Ala, Pro, Leu, His, Val, or Gln;
  MUTAGEN 121: Xaa at position 121 is Ala, Ser, Ile, Asn, Pro, Lys, Asp, or Gly;
  MUTAGEN 122: Xaa at position 122 is Gln, Ser, Met, Trp, Arg, Phe, Pro, His, Ile, Tyr, or Cys;
  MUTAGEN 123: Xaa at position 123 is Ala, Met, Glu, His, Ser, Pro, Tyr, or Leu;
APMTQTTSLKTSWVNCXXXXXXXXXXXXXXXXXXXXXXNXXXXXXXXXXXXXXXXXXXXXXXXXXXXXXXXXXXXXXXXXXXXXXXXXXXXXXXXXXXXXXXXXXXFXXXXXXXXXXXXXXXXQQTTLSLAIF

SEQ ID NO: 262 - protein, 153 aa, Unknown
  MUTAGEN 112: position 112 is deleted or Leu, Ala, Val, Ile, Pro, Phe, Trp or Met
  MUTAGEN 113: position 113 is deleted or Pro, Phe, Ala, Val, Leu, Ile, Trp or Met
  MUTAGEN 114: position 114 is deleted or Pro, Phe, Ala, Val, Leu, Ile, Trp or Met
  MUTAGEN 115: position 115 is deleted or Gln, Gly, Ser, Thr, Tyr, or Asn
SPAPPACDLRVLSKLLRDSHVLHSRLSQCPEVHPLPTPVLLPAVDFSLGEWKTQMEETKAQDILGAVTLLLEGVMAARGQLGPTCLSSLLGQLSGQVRLLLGALQSLLGTQXXXXGRTTAHKDPNAIFLSFQHLLRGKVRFLMLVGGSTLCVR

What is claimed is:

1. A Progenipoietin conjugate having at least one water-soluble polymer molecule covalently attached to at least one amino acid residue of a biologically active Progenipoietin polypeptide.

2. The Progenipoietin conjugate of claim 1 wherein said polymer is a poly(ethylene oxide) molecule.

3. The Progenipoietin conjugate of claim 2 wherein said poly(ethylene oxide) molecule is a poly(ethylene glycol) molecule.

4. The Progenipoietin conjugate of claim 3 wherein the poly(ethylene glycol) is attached at an amino acid residue having a free amino, carboxyl or sulfhydryl group(s).

5. The Progenipoietin conjugate of claim 4 wherein said poly(ethylene glycol) is conjugated through a activated poly(ethylene glycol).

6. The Progenipoietin conjugate of claim 5 wherein said activated poly(ethylene glycol) is selected from the group consisting of, para-nitrophenyl, succinimidyl, carbonyl imidazole, azlactones, cyclic imide thiones, isocyanates, isothiocyanates, aldehydes, primary amines, hydrazine, acyl hydrazides, carbazates, semicarbamates, thiocarbazates, thiols, maleimides, sulfones, and phenyl glyoxals.

7. The Progenipoietin conjugate of claim 6 wherein said activated poly(ethylene glycol) is selected from the group consisting of, succinimidyl, carbonyl imidazole, aldehydes, acyl hydrazides, carbazates, semicarbamates, and maleimides.

8. The Progenipoietin conjugate of claim 7 wherein said poly(ethylene glycol) has a molecular weight of between about 0.5 kDa and about 100 kDa.

9. The Progenipoietin conjugate of claim 8 wherein said poly(ethylene glycol) has a molecular weight of between about 3.4 kDa and about 40 kDa.

10. The Progenipoietin conjugate of claim 4 wherein said poly(ethylene glycol) is a branched polymer.

11. The Progenipoietin conjugate of claim 10 wherein branched poly(ethylene glycol) polymer has a molecular weight of between about 10 kDa and about 40 kDa.

12. The Progenipoietin conjugate of claim 4 wherein said poly(ethylene glycol) is a bifunctional polymer.

13. The Progenipoietin conjugate of claim 1, 2, 3, 4, 5, 6, 7, 8, 9, 10, 11, or 12 wherein said Progenipoietin polypeptide is of the formula:
R₁-L₁-R₂, R₂-L₁-R₁, R₁-R₂, or R₂-R₁
wherein R₁ is a polypeptide comprising; a modified flt-3 ligand amino acid sequence of the Formula:
```
SEQ ID NO:1
ThrGlnAspCysSerPheGlnHisSerProIleSerSerAspPheAlaValLysIleArg
                                                      10 20
GluLeuSerAspTyrLeuLeuGlnAspTyrProValThrValAlaSerAsnLeuGlnAsp
                                                      30 40
GluGluLeuCysGlyGlyLeuTrpArgLeuValLeuAlaGlnArgTrpMetGluArgLeu
                                                      50 60
LysThrValAlaGlySerLysMetGlnGlyLeuLeuGluArgValAsnThrGluIleHis
                                                      70 80
PheValThrLysCysAlaPheGlnProProProSerCysLeuArgPheValGlnThrAsn
                                                      90 100
IleSerArgLeuLeuGlnGluThrSerGluGlnLeuValAlaLeuLysProTrpIleThr
                                                      110 120
ArgGlnAsnPheSerArgCysLeuGluLeuGlnCysGlnProASrSerSerThrLeu
                                                      130
```
wherein the N-terminus is joined to the C-terminus directly or through a linker (L₂) capable of joining the N-terminus to the C-terminus and having new C- and N-termini at amino acids;
28-29
29-30
30-31
31-32
32-33
34-35
36-37
37-38
38-39
39-40
40-41
41-42
42-43
64-65
65-66
66-67
86-87
87-88
88-89
89-90
90-91
91-92
92-93
93-94
94-95
95-96
96-97
97-98
98-99
99-100
100-101
101-102
102-103
respectively;
wherein R₂ is a factor selected from the group consisting of: a colony stimulating factor, a cytokine, a lymphokine, an interleukin, and a hematopoietic growth factor;
wherein L₁ is a linker capable of linking R₁ to R₂; and
said Progenipoietin protein can optionally be immediately preceded by (methionine⁻¹), (alanine⁻¹) or (methionine⁻², alanine⁻¹).

14. A composition comprising the Progenipoietin protein of claim 1, 2, 3, 4, 5, 6, 7, 8, 9, 10, 11, or 12 and at least one pharmaceutically acceptable carrier.

15. A method of treating a patient having a hematopoietic disorder comprising administering to said patient a therapeutically effective amount of the Progenipoietin conjugate of claim 1, 2, 3, 4, 5, 6, 7, 8, 9, 10, 11, or 12.

16. The method of claim 15 wherein said hematopoietic disorder is neutropenia, leukopenia, thrombocytopenia, or anemia.

17. The method of claim 16 wherein said hematopoietic disorder is the result of chemotherapy, radiation therapy, or bone marrow suppressive drugs.

18. A method of treating a patient recovering and/or suffering from a bone marrow transplant, burn, wound, parasite, bacterial or viral infection comprising administering to said patient a therapeutically effective amount of the Progenipoietin conjugate of claim 1, 2, 3, 4, 5, 6, 7, 8, 9, 10, 11, or 12.

19. A method of mobilizing hematopoietic progenitors and stem cells into peripheral blood comprising administering to said patient a therapeutically effective amount of the Progenipoietin conjugate of claim 1, 2, 3, 4, 5, 6, 7, 8, 9, 10, 11, or 12.

20. A method for the production of dendritic cells comprising the steps of;
a) separating hematopoietic progenitor cells or CD34+ cells from other cells; and
b) culturing said hematopoietic progenitor cells or CD34+ cells in a growth medium, comprising the hematopoietic protein of claim 1, 2, 3, 4, 5, 6, 7, 8, 9, 10, 11, or 12.

21. The method of claim 20, further comprising the step of;
c) pulsing said culturing hematopoietic progenitor cells or CD34+ cells with an antigen.

22. The method of claim 20, wherein said growth medium, further comprises; one or more factor selected from the group consisting of; GM-CSF, IL-4, TNF-A, stem cell factor (SCF), flt-3 ligand, IL-3, an IL-3 variant, an IL-3 variant fusion protein, and a multi-functional receptor agonist.

23. The method of claim 21, wherein said growth medium, further comprises; one or more factor selected from the group consisting of; GM-CSF, IL-4, TNF-α, stem cell factor (SCF), flt-3 ligand, IL-3, an IL-3 variant, an IL-3 variant fusion protein, and a multi-functional receptor agonist.

24. A method for treating a human having a tumor, infection or auto-immune disease, comprising the step of; administering the hematopoietic protein of claim 1, 2, 3, 4, 5, 6, 7, 8, 9, 10, 11, or 12 to said human.

25. The method of claim 24, further comprising; administrating one or more factor selected from the group consisting of; GM-CSF, IL-4, TNF-α, stem cell factor (SCF), flt-3 ligand, IL-3, an IL-3 variant, an IL-3 variant fusion protein, and a multi-functional receptor agonist.

26. A method of conjugating a poly(ethylene glycol) to a nucleophile wherein the conjugation is carried out in the presence of an inorganic solvent.
